United States Patent Application Publication US 2007/0054278 A1 - sequence listing, part 148

SEQ ID NO: 555448 - DNA, 201 bp, Homo sapiens
gggtgcagtgcaccagcatggcacatgtatacatatgtaactaacctgcacaatgtgcacatgtaccctaaaacttaagtataataataataaaaaaaaaagacagtatcctgaacattttggcctgctttgagaatcaatcaccgtgttacataactttggtctattaaagattggagctgggtaaaggggagggcaatg

SEQ ID NO: 555449 - DNA, 201 bp, Homo sapiens
gtaggttaatattttcagagctcaaagcaagtgtggattggggttgtttataggtgcagttttgcttgatctctgtatctgcaaatggagtaaaaaagtayagtactgctgttttgggaaacttctgcaaaagtccctgagccaatgcaaattaattttcttcaaaaataccaagaaaattccccatttggctgtttcacc

SEQ ID NO: 555450 - DNA, 201 bp, Homo sapiens
tgagccagcagcccaaacagcaggtgaggaaggcgggctaggcctggctagtgttggcagctgccctaggctgctgggctgaggctcctacagccccaccyggaggaatagggggcaggcgaagcccagcttcagggtcagagaggccttggggagtgggttgttaggggacgggctccaggagtccgggcacgcccatgg

SEQ ID NO: 555451 - DNA, 201 bp, Homo sapiens
gttggccaggttggtctcgaactcctgaccttaagtaatccaccagctttggcctcccaaagtactgggattacaggcgtgagccactgcacccggccatrcattacctcctttagcagtcattgccttcttgaagtggtggaggtccaggtatttctgccagccattcctggtctggttctggttggggaagcgcctgtc

SEQ ID NO: 555452 - DNA, 201 bp, Homo sapiens
tctcttctgacccagggctgagacaggttaaggggtgaatctccttcctttctctccctgctttgctgtgaagggagaaattagcctgggcctctaccccctattccctgtgtctgccaaccccaggatcccagggctccctgccattttagtgtcttggtgtagtgtaaccatttagtggttggtggcaacaattttatg

SEQ ID NO: 555453 - DNA, 201 bp, Homo sapiens
tgtgaatgtcagtgtacaagtgtctgtcttgagtccctgctttcagttctgggcataaacctagggttggaattgccggatcatatggtaatttcttcttyttttttccttggagacggagtctgttgcccagattggagtgcagtagcacgatcttggctcactgcaacctctgcctctggggttcaagcaattctcctg

SEQ ID NO: 555454 - DNA, 201 bp, Homo sapiens
ttttcccctttgccggttaatgcagagctcactctgccgttcaggtgcagtgtctgcctgggaagagagcggcctgtgatcagggccacagacttggcttycatcctagggccttggagaggagtgggtcatgcccagtgccttgcgtgttttctctgccccatcagaagatggattggaccaagctctcccttgagaact

SEQ ID NO: 555455 - DNA, 201 bp, Homo sapiens
agcgtagagcatctggaaagctttttttgctgggtggtggtcctcgttaggatattttgagtttggaagaggtgtttttaaaaaagttttaggaggaggaytcagtgttttggaggttttgagcaaaaggcaagactctgatgctttgtggattgttatcgccctgcaagacccttcgcaacttcctctcaccgcccacag

SEQ ID NO: 555456 - DNA, 201 bp, Homo sapiens
ggcccagctgttggggttccctctccttggttgtgctttccctgcctcccttcctcctccctttaattgggggtgctccttaggctctgccctctgcctcytctctgcctctgcctctgcctctgcctctgcctgtacttcttcctgctccccagcctgtgctcacaggctctctgtggctctgttcccttcttctggggc

SEQ ID NO: 555457 - DNA, 201 bp, Homo sapiens
cctgagcccaggagtttgagattatagtgagctatgattgcaccactacactccagcctgggagacatagcgagaccctgtctcttaaaaaaaacaaacaraaacagtgggtgggaaaatacacatttttaaatattgagtcttcctatccattactttgttttatctcttcaattaaataggttttctttaatgtcttac

SEQ ID NO: 555458 - DNA, 201 bp, Homo sapiens
atctcctggattgctcagcctcccctgggctggcacagagctgcccagccagaacaacaaggcagcagatggctaggtgaggacaagtcttttttttttttctttttcttcatttttttccagtctttacctttactatatataatgtcctctgaggcttcattgcctagtgtcctttggcttgtcttatcctatgctggt

SEQ ID NO: 555459 - DNA, 201 bp, Homo sapiens
cttgctatttggttccattgggctatttgtgtattcctgccctcacagttttaattacgataactgtaataagccctgttgtatgggagaagtaagtcctyccaccttgttcttgttcaagagtttcattcttgtctgttcttggtcatttgcatttccatataaaattactcaggattttgattggaattgcattgcatc

SEQ ID NO: 555460 - DNA, 201 bp, Homo sapiens
gatggctctgtgactgttgagggactggtttagtttgcccagagtctcataaatgcagaaattaggacattggactttgaggaactagagctttgctaccwtgtgtcaaaattcatattccatttggcagccattcaaaatgaatggaaaatgcccatgagatcatgcagtgttacaggtttttggggtttttttttggtt

SEQ ID NO: 555461 - DNA, 201 bp, Homo sapiens
gctgtgctctgatggggacatgttgtaaatgtaaacgtgggagactgagagtaaacaagaaaagtatgtagtattccgccttttttttttttttttgagayggagtcttgctctgtctcccaggctggagtgcagtggcactatcttggcgcactgcaacctctgcctcctgagttcaagtgattctcctgcctcagtctc

SEQ ID NO: 555462 - DNA, 201 bp, Homo sapiens
ccgctacccgggttcaagcgattctcctgcctcagcctcccgagcagctgggattacaggcgtgcaccgtcacacccagctgatttttgtatttttagtaragatggggtttcaccgtgttggccaggatgctcttgatctcttgacctcgtgatccgcccacctcgtactcccaaagtgttgggattacaggcgtgagcc

SEQ ID NO: 555463 - DNA, 201 bp, Homo sapiens
aaacttcagccaggtgggatgttatttgcaggagggcacaggtgacctggaatttgtattctaaacagatcacttagacgtattgattatggggacttcaraaagaggcagtagcttttttaaaaaaattggtttgcactttgccaaaaagtatactggagtgaaaatagactgatccagggtcttagactgggctgtggt

SEQ ID NO: 555464 - DNA, 201 bp, Homo sapiens
gggaggcagaggtggcagtgagccgagatcacaccactgcactccagccttggctacagggtgagactctgtctcaaaaaaaaaaaaaaaaaaaaaaaaamccaaaaaaaaaaacttcagccaggtgggatgttatttgcaggagggcacaggtgacctggaatttgtattctaaacagatcacttagacgtattgattat

SEQ ID NO: 555465 - DNA, 201 bp, Homo sapiens
aagttgcatatctctctctctttttctttctttctctttctttctttccttctttctttctttctttctttctttctttctttctttctttctttctttctctttctttctttcattctgtctctctctctctttctttctttctttttcttttctttcctttctttcttgacaaaatctcacttgctctcccaggctgga

SEQ ID NO: 555466 - DNA, 201 bp, Homo sapiens
ggaaatatatggaaattgtttctgaagtatccagaaaaggcatttatttaagttctgctttaacttaatgcaggtttgtttcgtaaaattttgtgcaaaayctgcagtagtgaaatgttccatttgcaaattcaaccacacagacttcaggaaatacaaagttgcggtacttataacatgaactcttctacagttacacct

SEQ ID NO: 555467 - DNA, 201 bp, Homo sapiens
ggagatgccttaggactacgttaatctctgagtccacttagggcttgggatgtattctcacagcccttgctcctcctccatcttagagtttatttttaccrtcattgcaacctcctctaagtgattcttccagacccatagttagcctttgagattccgcagttctcctccctactcttccccaccatgtcttcattgaga

SEQ ID NO: 555468 - DNA, 201 bp, Homo sapiens
ctgaaggtacagcaagtagaggatcagctttttgagaaggtttcttagaataggtaagttttaagccatgtttgtaagatgatggacatgaaggggtggcrggactgagtttcctcaaagatactatatccagagaattcattccaatttggaatgtttcataatttaaaaaagagtggcatggcctttgtcacacatctt

SEQ ID NO: 555469 - DNA, 201 bp, Homo sapiens
tttaccacttatctctataattctagaaaagtggctttgaggctatacaccagaatatgaataactttctctgagtagtgagatttcataggggacattawattttttccatcttttgggttttcctgtatctttctgattttctatgatgagcatacatttcttttgtattccaataaagcttatgttggctgggcacag

SEQ ID NO: 555470 - DNA, 201 bp, Homo sapiens
tcagggaaggggcaaagaagacagataccactaccattttgttctttctggttttactaatatgaccataatgagtcattttttatgcatataggctatgkgtttcaggttgcctttccttttcctcctacagatctattgagctttgtgttctaaacaagatagtgtgcttatctgaatgtttcccatctgtctttgatg

SEQ ID NO: 555471 - DNA, 201 bp, Homo sapiens
gaggttagatctgaagccttccctgctgtctcattgccaatattagagaaaatgacaaggcagcatttatttccaaaggaatagctaggaaaagatggccmaatgtgaaagactagattaaaatcactgttgtctgttatttatttggtaacccatcatgcattttgtttcatcttggggttttttatttagagacaggtc

SEQ ID NO: 555472 - DNA, 201 bp, Homo sapiens
atcactgcctgtctcgggcaccaaaactgagctgattgagcgccttcgagcctatcaagaccaaatcagccctgtgccaggagcccccaaggcccctgccrccacctctatcctgcacaaggctggcgaggtggtggtagccttcccagcggcccggctgagcacggggccagccctggtggcagcaggcctggctccagc

SEQ ID NO: 555473 - DNA, 201 bp, Homo sapiens
tgtctcaaaaaaaaaaaaaaaaaattgttaataactgccaaaactgttaaacaacttaaaactaggctgggtgcagtggcttatgcctggattcccaacaygttgggaggccaaggctggtggatcacttgaggccaggagttcaagaccagcctgggccaacatggtgaaaccccatctcaactaaaaatatatataaaa

SEQ ID NO: 555474 - DNA, 201 bp, Homo sapiens
gaagttgcatatctctctctctttttctttctttctctttctttctttccttctttctttctttctttctttctttctttctttctttctttctttctttctctttctttctttcattctgtctctctctctctttctttctttctttttcttttctttcctttctttcttgacaaaatctcacttgctctcccaggctgg

SEQ ID NO: 555475 - DNA, 201 bp, Homo sapiens
tgaagttgcatatctctctctctttttctttctttctctttctttctttccttctttctttctttctttctttctttctttctttctttctttctttctttctctttctttctttcattctgtctctctctctctttctttctttctttttcttttctttcctttctttcttgacaaaatctcacttgctctcccaggctg

SEQ ID NO: 555476 - DNA, 201 bp, Homo sapiens
ttaaggtaaagaagatgtattagctagtagtaatggttccacagctttgcaaattacactaaaatccactgagttgaatacttcgaaagggcgaattttayagtatgtgaattatataccagtaaagctattatctaacaagtaagaccaaattatctgtataggtaagatacctgtcttttttgctgagtagagctatat

SEQ ID NO: 555477 - DNA, 201 bp, Homo sapiens
ctgaagttgcatatctctctctctttttctttctttctctttctttctttccttctttctttctttctttctttctttctttctttctttctttctttctttctctttctttctttcattctgtctctctctctctttctttctttctttttcttttctttcctttctttcttgacaaaatctcacttgctctcccaggct

SEQ ID NO: 555478 - DNA, 201 bp, Homo sapiens
tctgaagttgcatatctctctctctttttctttctttctctttctttctttccttctttctttctttctttctttctttctttctttctttctttctttcyttctctttctttctttcattctgtctctctctctctttctttctttctttttcttttctttcctttctttcttgacaaaatctcacttgctctcccaggc

SEQ ID NO: 555479 - DNA, 201 bp, Homo sapiens
atctgcttatatgcttgtatctcctgctagactatgatctccttgagaaagtatcattcatgtgtgtatatatatatatatatatatatatatatatatatgtatatatgtgtgtgtgtgtgtgtgtgtgtgtgtgtgtgtgtgtgtgtatattttatcagtcccgtccccagtgcctggcactgaatgaaggaatgaatg

SEQ ID NO: 555480 - DNA, 201 bp, Homo sapiens
cctacagccccacccggaggaatagggggcaggcgaagcccagcttcagggtcagagaggccttggggagtgggttgttaggggacgggctccaggagtcygggcacgcccatgggtcctgtggatctggctgcttattctggggcagagggaggggcctcattcgtagttcgggctgggagcccccattcaagattttta

SEQ ID NO: 555481 - DNA, 201 bp, Homo sapiens
atgactgagtaaaatctctttgagcataactaactttattaagtttctttattaagattatttggccacatgccccagagattgatggtgaaatttatttkcctttccttatcaattacaaacactactagaaatttattcttgttcagactttggaatgagaattttttttttttcagagagaattaaatgagtttgctt

SEQ ID NO: 555482 - DNA, 201 bp, Homo sapiens
tatctgcttatatgcttgtatctcctgctagactatgatctccttgagaaagtatcattcatgtgtgtatatatatatatatatatatatatatatatatatgtatatatgtgtgtgtgtgtgtgtgtgtgtgtgtgtgtgtgtgtgtgtatattttatcagtcccgtccccagtgcctggcactgaatgaaggaatgaat

SEQ ID NO: 555483 - DNA, 201 bp, Homo sapiens
aaaaagacaaatgatgctttggttattgcggttatctgcttatatgcttgtatctcctgctagactatgatctccttgagaaagtatcattcatgtgtgtrtatatatatatatatatatatatatatatatatgtatatatgtgtgtgtgtgtgtgtgtgtgtgtgtgtgtgtgtgtgtgtatattttatcagtcccgtc

SEQ ID NO: 555484 - DNA, 201 bp, Homo sapiens
gcctcccgggttcacgccattctcctgcctcagcctcccaaatagctgggactacaggtgcccaccacagcgcctggctaattttttttttttttttttttgtatttttagtagagacggggtttcaccgtatgagccaggttggtctcgatctcttggcctcgtgatcctcctgcctcagcctcccaaagtgctgggatt

SEQ ID NO: 555485 - DNA, 201 bp, Homo sapiens
tttatttggctcatggtttttcaggctgtacaagcattgcaccagcgtctgctcagcttctagagaggcctcaggaagcttttacttatgacagaaggcamatggggagcaggagtgtcacatggcgagagagggagcaagagagatcccatgctcttttaaaccagcatgcacatgagctaaaagagtgagaactcatta

SEQ ID NO: 555486 - DNA, 201 bp, Homo sapiens
catatttatgaatttcccaaattttcttttgctctttattatgtttctttatatatatatatatatatatatatatatatatatatatatatatatatatataaaattttggagatggggtcttgctgtgtcacccaggctagaatgcagtggtacaatctcggctcactgcaacatccacctccagggttcaagcaattc

SEQ ID NO: 555487 - DNA, 201 bp, Homo sapiens
tggcttcccaaataacgctgagttaattatagtgtaaccttttattctatttggagagtgtcaagggattttttgaatgccttccaaaattcactttcatraggtgagcttagaaagcttagaaaacgctttctagagcagggattctcaaaactttaccttcatgatccaccctgcctcttctgggtacttatttggttt

SEQ ID NO: 555488 - DNA, 201 bp, Homo sapiens
gatctacctgcctcagcctcccaaagtgctgggattacaggcgtgagccaccgcgcccggccccaaaattcttaatttaatcatgcctgcaaagactcctrgccctttttgctgtaaaaggtaacattcacagattcccggtattaggctatggatatcttttgggccatttttcagcctatcatagtctcttctctgctc

SEQ ID NO: 555489 - DNA, 201 bp, Homo sapiens
ggtggcaggcacctgtaatcccagctacttgggaggttgaggcaagagaatcgcttgaacccgggaggcggagattacagtgagccgagaccgcgccactrcactccagcctgggcaacagagcaagactgtctcaaaaacaaacaaacagaaaatacacacacacacacacagccatcagctatcctgggtctaaggaat

SEQ ID NO: 555490 - DNA, 201 bp, Homo sapiens
ctccaggctgggcaacagagcgagactctgcctcaaaaaaaaaaaaaattattcttactaactacataggattcagtgagtggagatatatatatatatawaaaattttttttaatttatgaggtttaattggttcatggttttgcaagcctgtacaaggatggtgccatcaaggagcttttatacatgatagaaggtgaa

SEQ ID NO: 555491 - DNA, 201 bp, Homo sapiens
tttaatctgatactcaggctctcctcccgccttcacacaccattggagtctcctaagctatttctgtcagtttaatgatccccagctgttgccacagttcrggctgttttcatgcccaggagaagcatcgaagaggcagaggaaaaggggtcttgtttgttgtctgtcccacagtgtgtaaaacaaatcaaattcattttt

SEQ ID NO: 555492 - DNA, 201 bp, Homo sapiens
accttcttatctctgccactaaaactactctagctagtctaagccaccctatttccagttaaaccaattaaataaatgcttaattggttttcttccgtccrtcattctctctaactcccttcagtcaattctccacactgaagccagagttttaaaatgcatatctaatcataccatgctctttcctcttccctcaagcct

SEQ ID NO: 555493 - DNA, 201 bp, Homo sapiens
gcatatttatgaatttcccaaattttcttttgctctttattatgtttctttatatatatatatatatatatatatatatatatatatatatatatatatatataaaattttggagatggggtcttgctgtgtcacccaggctagaatgcagtggtacaatctcggctcactgcaacatccacctccagggttcaagcaatt

SEQ ID NO: 555494 - DNA, 201 bp, Homo sapiens
tgcatatttatgaatttcccaaattttcttttgctctttattatgtttctttatatatatatatatatatatatatatatatatatatatatatatatatwtataaaattttggagatggggtcttgctgtgtcacccaggctagaatgcagtggtacaatctcggctcactgcaacatccacctccagggttcaagcaat

SEQ ID NO: 555495 - DNA, 201 bp, Homo sapiens
tttctttttttgagatggagtcttgctctgttgctcaggctggagtgcagtggcatgatctcggctcactgcaacctctgcctcccaggttcaagcgattytcttgcctcagcctcccaagtagctgggattacaggcgcgtgccaccacatctggctaattcttggttttttttttttttttttttttttttaatagaaa

SEQ ID NO: 555496 - DNA, 201 bp, Homo sapiens
caggctggtctcgaactcctgacctcaggtgatccgcccacctcagcctcccagcatgctgagattacagacgtgaaccaccaccttagatggcttttgtrtcttaaagacagggccagttattagagatacaaatctgtgtaagacatggttctcattctcacagaactcctagctctaatggattcaaagtgaataatt

SEQ ID NO: 555497 - DNA, 201 bp, Homo sapiens
atgaagaaatgtaaagagggaagtaataggggcatctactttatagtagacattgtgctaccttattaatcctcatatgaactctgaaataagtggtagtrgcagcattttgcagatgagcaaagagaagcttctagaggaacttctagataacaggatttttgttgttgttttgcttttttgttttttttagacagagtc

SEQ ID NO: 555498 - DNA, 201 bp, Homo sapiens
attgtaattattcacttttttttttcagacggagtctggcactgttgcccaggctggagtgcaggggcacaatttcggctcactgcaacctccgcctcccrgattcaagccattctcctgccacagcctccctggtagctgggattacaagcatgcaccaccatgcctggctaatttttctattttaattgagatgggatt

SEQ ID NO: 555499 - DNA, 201 bp, Homo sapiens
actgtaggcttactccttaaccttcctgtgattcagcttcttcatctgtaaactagagttaataatccttacaacatgaggtcgttataaggattatgaaraaatgtaaagagggaagtaataggggcatctactttatagtagacattgtgctaccttattaatcctcatatgaactctgaaataagtggtagtagcagc

SEQ ID NO: 555500 - DNA, 201 bp, Homo sapiens
cttttattcatgtcctttggcttgaactagtcacatgaccccacttagctgcaagggaggctggaaaacatagtcttccttctgatatgtatttagctaamacttatgtattcttttactgggaagaaggagtgagagaggatattgggcaacaacctcccaggcctgtcacaatgatctaagtgaggttcttttactccc

SEQ ID NO: 555501 - DNA, 201 bp, Homo sapiens
ctttatcaaattttatttttaaatttttatctttttgagtcaaatagctaaaattttacatcatttaggactgaagagtgagaatttactgttttttttttctttatccatagaaaacttgatacataaacatttgaataagcttcagattgtttgtctatctaattatctatctatctataacccaacccatatggtcta

SEQ ID NO: 555502 - DNA, 201 bp, Homo sapiens
tcccagatgcaagcgattctcctgcctcagcctcctgagtagctgggatttacaggcacgtgccaccatgcccagctaatctttgtatttttagtagagayggggtttcaccatgttggccaggatggtctcgatctcctgacctcgtgatccgcctgcgtcggcctcctaaagtgctgggattacaggtgtgagccaccg

SEQ ID NO: 555503 - DNA, 201 bp, Homo sapiens
caatagagattcaggcttgtgataagtaggatcagaatggtaatgttagataactaccctaagcaattaactacacttttctgatttttttttttttttttgcgacagagtcatgctttgtctcccagactggagtgcagtggcgcgatctctgcccactgcaacctctgccttcaagcgattctcttgcctcagcctccc

SEQ ID NO: 555504 - DNA, 201 bp, Homo sapiens
gcaatgaatggacacatcgaagacgagatggagtgattatcagtgcccagtttgcagagagaatattttttttcttcttttcttttcttttttttttttttgagatggaatctcactctgtcgcccaggctggagtgcagtggcgcaatccctgctcactgcaagctccgcctcctgggttaataccattctcctgcttca

SEQ ID NO: 555505 - DNA, 201 bp, Homo sapiens
gtacccaatcctgctgcccaggcttgggctgccacctgcagaggccacgggcgaagctggatggggctaatttctgccttttcttcccaggtcagcaggcraggccctgggaagcagcgggacccccccagtacgcagcctctccactaccaatagcagctccagctcgggcgcccctgggccctgtgggctggcacgtca

SEQ ID NO: 555506 - DNA, 201 bp, Homo sapiens
ttttaatctgatactcaggctctcctcccgccttcacacaccattggagtctcctaagctatttctgtcagtttaatgatccccagctgttgccacagttyaggctgttttcatgcccaggagaagcatcgaagaggcagaggaaaaggggtcttgtttgttgtctgtcccacagtgtgtaaaacaaatcaaattcatttt

SEQ ID NO: 555507 - DNA, 201 bp, Homo sapiens
ttttgagtcgactcccaaacctgccacttgctagctgtgtaatcttgtgccttggtttcctcgtctgaaaaatgaggataatagcaccaatcgcatacggytgtttgttgtaagtgtcgaatgaaataattcacgtgaagcgtttgacacagtgcttggcccatagtaagggcccaagaaatgtttgcttttgggatgttg

SEQ ID NO: 555508 - DNA, 201 bp, Homo sapiens
tcatcagtgttgtttcctgtaacaatagtttattgggtttttaaaaattgctgaagtagtattctgttaaaggggtgtaccataattttttttttttttttagacagagtctggctctgttacccaggctggagtgcagtggcatgatctcggctcactgcagccttcgccccctgggctcgagtgatgctcctaccttag

SEQ ID NO: 555509 - DNA, 201 bp, Homo sapiens
ctcttctgacccagggctgagacaggttaaggggtgaatctccttcctttctctccctgctttgctgtgaagggagaaattagcctgggcctctacccccyattccctgtgtctgccaaccccaggatcccagggctccctgccattttagtgtcttggtgtagtgtaaccatttagtggttggtggcaacaattttatgt

SEQ ID NO: 555510 - DNA, 201 bp, Homo sapiens
ctcccgagtagctgggattacaggcgtgtgccaccacacccggctaacttttatatttttagtagagaccgagtttcaccatgttggtcaggctggtctcraattcctgacttcgtgattcgccctcctcagcctcccaagtgctggattacaggcatgagccactgcacccagccagacagtgtactttttttttttttt

SEQ ID NO: 555511 - DNA, 201 bp, Homo sapiens
cctgtattccttcctacctagtggctttcatgaaagctccctaaaagccagtgcctcccatcttccctcctagagtgtgagaggccctggccctatccccrccccccgccccctacaaggcaggtctgcacccccagccccctggccactggtcctctccctgctctcctgtccagccctcgtcccagcctggctctccag

SEQ ID NO: 555512 - DNA, 201 bp, Homo sapiens
aatatctcaaggtcacagcagctgctaagtggtagagccaaaatttgaacccaagcaatctagctgtagagccttattattattattattattattaatttatttttttttttctgagactgagtctcattctgtggcccgggatggagtgcagtggtgcaatcttggctcactgcaacttccacctcccaggttcaagcg

SEQ ID NO: 555513 - DNA, 201 bp, Homo sapiens
aatccccctctgtgagaaacacccaagaattatcaataaaaaaataaattaaaaaaaataaaaatataaaaaaaataaaaaatgaaatgttaaaaaaaaaataaaaaaaataaaaactgtaacaaaaaaaaagaaagcaatatgaaagtatgttattatttctctttgtaggcatagacttttactttaatgaagcataaa

SEQ ID NO: 555514 - DNA, 201 bp, Homo sapiens
agaaaaagaaggaagaggaggaagatgaggaagacgaagaggatgaggaggaggaagatgaagaagatgaagatgaagaagatgatgaataagttggttcyagcgcagttttttttttcttgtctataaagcatttaacccccctgtacacaactcactccttttaaagaaaaaaattgaaatgtaaggctgtgtaagatt

SEQ ID NO: 555515 - DNA, 201 bp, Homo sapiens
ctgcatatcgagctaaaggaaagcctgatgcagcaaaaaagggagttgtcaaggctgaaaaaagcaagaaaaagaaggaagaggaggaagatgaggaagaygaagaggatgaggaggaggaagatgaagaagatgaagatgaagaagatgatgaataagttggttctagcgcagttttttttttcttgtctataaagcatt

SEQ ID NO: 555516 - DNA, 201 bp, Homo sapiens
cacaactcactccttttaaagaaaaaaattgaaatgtaaggctgtgtaagatttgtttttaaactgtacagtgtctttttttgtatagttaacacactacmgaatgtgtctttagatagccctgtcctgatggtattttcaatagccgctaaccttgcctggtacagtatgggggctgtaaattggcatggaaatttaaag

SEQ ID NO: 555517 - DNA, 201 bp, Homo sapiens
agttatatatggggatgatagttttttcatcttcagttgtctctgatgcagcttatatgaaataattattctgttaactgaataccactctgtaattgcaragtgttttgttgcaagaaaaagttgcagctgttttgttgacattctgaatgcttctaagtaaatacaatttttttattagaaaaaaaagatattgcatgt

SEQ ID NO: 555518 - DNA, 201 bp, Homo sapiens
attgcagtacactgagctccacagagacagcgccggggcaagtgagagccggacgggcactgggcgactgtgcctcgctgaggaaaaataactaaacatgrgcaaaggagatcctaagaagctgagaggcaaaatgtcatcacatgcattttttgggcaaacttgtcgggaggcgcataagaagaagcacccagatgcttc

SEQ ID NO: 555519 - DNA, 201 bp, Homo sapiens
atggaaatttaaagcgggttcttgttggtgcacagcacaaattagttatatatggggatgatagttttttcatcttcagttgtctctgatgcagcttataygaaataattattctgttaactgaataccactctgtaattgcagagtgttttgttgcaagaaaaagttgcagctgttttgttgacattctgaatgcttcta

SEQ ID NO: 555520 - DNA, 201 bp, Homo sapiens
cctctgccaggatcccggcgcagagcgcggccaccagaagccgcagcgtcatcctaggcagtaaaagccgtcagctaggacccccgcctctgtcccttgcwcccccgtggccttggcaggtccgagcccagcgcccctccagcccgagtcctggtcttgcctgcgcgtccgcccgctcccgccgccgccgctgcagtctct

SEQ ID NO: 555521 - DNA, 201 bp, Homo sapiens
caggaaatcaaatacgtggggctttagggcacctctactcaccactgaccccggtggtccaggtggccccaggggtcctgggattccttctctccctgggrggcctgccagaccctaccagaaaaatggggcaagagaggcagagagtgacttgggaaccctcctaccctctgccccctcaagactgggaacccccaaggc

SEQ ID NO: 555522 - DNA, 201 bp, Homo sapiens
ggggtcaggagcacataggatggaatcagcactgccaagtggggattggggtccggggtctaggtcagggtacaccgtgtgggcaggaactcacgaggtcrggtcacaggcacgccaccagcagtcgtgcacactctccgggaaacgaggggcagtagtgtcctcaagatgctgaagtcattgacgaagaagaagaagtca

SEQ ID NO: 555523 - DNA, 201 bp, Homo sapiens
tcaccagctgggacgttcacctgcccagggcaagaggtcactttatcttgcccagccaagtccccagccaccacctatcactcctgacatcctacctcctrccgctcactcggcagtggctgtcccagccccgtcagaggagtgtactggaccttgtagccagtcacagggccactggccgctgtccactgtactctcaag

SEQ ID NO: 555524 - DNA, 201 bp, Homo sapiens
ggccctgcacagggtctggtgtggggcagtcctgctcctccctgggacatcccggccgcctcccttcccccttcacctaccggctccccctttgggcctcraggtcctcgctctccctgaggacgaaacagagcagagggtggtgcttgggctcaggcgaatgtcaacgtgggcactgcaccaccaccccaggctcccacc

SEQ ID NO: 555525 - DNA, 201 bp, Homo sapiens
gacccgaccatgagcttccctgccccatcctgactccctgtcatgtccactgtccacagaccctgtaccttgggaccgatcaggccctccttgccaggggyccccgactggcccggcacaccaggctccccctggagaaaaaaagacatgaacttggcccccgtccacccgtggccccctcattctgagcgtgcccacact

SEQ ID NO: 555526 - DNA, 201 bp, Homo sapiens
ccactggggcctgggaagcccccaattcctggggttccctggggagatataggacagagtcagtaatcagaggccccagagatggaccctctcccaaagtscacgctcccctcaattcaccatgaccatggcttcaactcacccgctcccctttctcgccctggtcacccttggggcctggctgcccgtcaaagcctcggt

SEQ ID NO: 555527 - DNA, 201 bp, Homo sapiens
gcacttaccttctctccagcctcacccaggggccctggaaagccccggtcaccctgaagagagagggtgagagaaagacagagagagagagggttggtggsggggcttgaacgtcaaaccccagacaaggggtcccaaactccaaccaccccctccaaaaccacgacctctgacctggagggaactcttatctccttatct

SEQ ID NO: 555528 - DNA, 201 bp, Homo sapiens
gccagggaggccctgttctccacggaggcctggaagcccctggaaaaagtctttgttaagatttatagggcctctgagatatcccttggggcacaccccawggactaagaggaccccaaaaagatctccctccagggtagagacccccaggactgagaggtcccattgagatccctcaggcacagaccccatggatggggg

SEQ ID NO: 555529 - DNA, 201 bp, Homo sapiens
aggagtctcaccggaggaccctcgtcacctttctctccaacttcaccctgtgaaacatgagagtcagccctggttccaagaacccccatgatgctggcaayagccctactcccttacccgccatgactcccccgactccagcctcttacatctcgtcctcgggggccaacaggtcctggggggccaggccgcccagggtct

SEQ ID NO: 555530 - DNA, 201 bp, Homo sapiens
gccaacaggtcctggggggccaggccgcccagggtctcccttctctccaggaggccctgagtcaccctgtggaggaggcaagagggaggtgatgcaggacrctcgaagcaagcagttctcaaggggaggggaccccagaagccttgaggttgcccagggtaacgggtactcactgggggtcctgctctgccagtaaggcca

SEQ ID NO: 555531 - DNA, 201 bp, Homo sapiens
cacccaggttgttcccacttgggtccatgtagggcatgtcacggatcctttgcaagataatgccaaggtcatgggagccattcagtgggaacagtggggarggccgatgactgtaagacagcaggccaacctggggtggaaggaaacacagagcctgaggaggatgacagagcagggatgggggtgcacagagcctggaga

SEQ ID NO: 555532 - DNA, 201 bp, Homo sapiens
gcaggaagtcagggtgggtcatcagcaggggaggagcacgccaaggtgaggcaggcttaccagtgcgcgcagtcacctctgcagagggcccttctccagcyggccctaggacactcagcctcacgcggtactgtgtcgctggctccagcccgtccaggtgatagctgctgagctcgggccccaggacccgggactgttcct

SEQ ID NO: 555533 - DNA, 201 bp, Homo sapiens
tgccaagactcacccgaaggccacgctcgcctgcttttccaggcaaacccgggtcaccctggtgatagagagaaaagtcatactgcacagggcagtcaggmtctaactcactcagggagaggggacagagaagggtctgagcagcagctggacaggaggcagggagtggatggatgaactggtggagcaccagcctactgg

SEQ ID NO: 555534 - DNA, 201 bp, Homo sapiens
tggtagccttcagatgcgtgtgtgcaggggtcaaaggaagtgaagattgggagggtttagcattacagggttggggggtaggatcaggtattgggaattgsctggttggagggttaaggttggggtgaggagtcataggctgggactcacatttcgtccatcctctccaggatctccctggtctcccttttcacccacagg

SEQ ID NO: 555535 - DNA, 201 bp, Homo sapiens
gagtcagccctggttccaagaacccccatgatgctggcaacagccctactcccttacccgccatgactcccccgactccagcctcttacatctcgtcctcrggggccaacaggtcctggggggccaggccgcccagggtctcccttctctccaggaggccctgagtcaccctgtggaggaggcaagagggaggtgatgcag

SEQ ID NO: 555536 - DNA, 201 bp, Homo sapiens
acatgagagtcagccctggttccaagaacccccatgatgctggcaacagccctactcccttacccgccatgactcccccgactccagcctcttacatctcrtcctcgggggccaacaggtcctggggggccaggccgcccagggtctcccttctctccaggaggccctgagtcaccctgtggaggaggcaagagggaggtg

SEQ ID NO: 555537 - DNA, 201 bp, Homo sapiens
gtggaaggaatgaggggacatgatgtggagccaaaggggcaagtgagaacaatgacagaggaccagacccagcgcagcccttaccagccgtcccgggggtyctgggggaccctgggaaaggaaatgattatagtcaataggagccctcaggtcccaggccatggctctggtttgccccaggctcaactctgcccccaagtt

SEQ ID NO: 555538 - DNA, 201 bp, Homo sapiens
aaccaggcaggactaccaagactcacattcggcccagagggcccagcggctcctggtttcccatccagtccgctccggccatccagcccagggggaccccrgtcaccctgtggaaaatagagtggtaagaggccaccaaggctgaggtggatctgataacccaggctcatgtcctgagaaacccccacaccctctcacctt

SEQ ID NO: 555539 - DNA, 201 bp, Homo sapiens
ggggaaggggacaaccaggcaggactaccaagactcacattcggcccagagggcccagcggctcctggtttcccatccagtccgctccggccatccagccyagggggaccccggtcaccctgtggaaaatagagtggtaagaggccaccaaggctgaggtggatctgataacccaggctcatgtcctgagaaacccccaca

SEQ ID NO: 555540 - DNA, 201 bp, Homo sapiens
gtgtgtgtggtgggggtgctggctgcgtccacctcaccctgggtgctgcgcacaatgatgcggtactgggtggcaccagggactgggctccaggacactcrcacccgctgcccgggcagctcggtggcttgcaggtctgttacagggctcacaggcagctctggtcctgttggagagcacagcatagaggcagcctggggc

SEQ ID NO: 555541 - DNA, 201 bp, Homo sapiens
gaccaaccaatgaggctggggtctagggtcctcatgtgaaggggtaggggaaggggacaaccaggcaggactaccaagactcacattcggcccagagggcycagcggctcctggtttcccatccagtccgctccggccatccagcccagggggaccccggtcaccctgtggaaaatagagtggtaagaggccaccaaggct

SEQ ID NO: 555542 - DNA, 201 bp, Homo sapiens
gagggtagtaagggggaaaagggggtaacatgaaagtctggtctcaccggtaatccagggggaccagaggggccagggaggccctgttctccacggaggcstggaagcccctggaaaaagtctttgttaagatttatagggcctctgagatatcccttggggcacaccccatggactaagaggaccccaaaaagatctccc

SEQ ID NO: 555543 - DNA, 201 bp, Homo sapiens
agccctgcctgggagcccgggaataccaggctttccaggctccccggcaaggccggaaggcccgggggggcccctctccccaagggccagaccaggtggcycctgagggccagggtctccacggtcgcccttcagcccgcgttctccaggaaagccgatggggccctgcaggagtggaagagagaatgctggtggctgtac

SEQ ID NO: 555544 - DNA, 201 bp, Homo sapiens
tcctggccttcctgcctctcccacacccccagccctgcctgggagcccgggaataccaggctttccaggctccccggcaaggccggaaggcccgggggggsccctctccccaagggccagaccaggtggcccctgagggccagggtctccacggtcgcccttcagcccgcgttctccaggaaagccgatggggccctgcag

SEQ ID NO: 555545 - DNA, 201 bp, Homo sapiens
accctctctcctggccttcctgcctctcccacacccccagccctgcctgggagcccgggaataccaggctttccaggctccccggcaaggccggaaggccygggggggcccctctccccaagggccagaccaggtggcccctgagggccagggtctccacggtcgcccttcagcccgcgttctccaggaaagccgatgggg

SEQ ID NO: 555546 - DNA, 201 bp, Homo sapiens
ctgtagaaacctccccttgccccataccaggcttaccttttctcctttgggtccagcaacagcaggtccctgaaaacaaacaggacagatacagcttggcsctgccttggggttgtatgatcaaagtcttcattggaatggaggtcacatggaattggaagtcatacagctcagtccccgcccagaagtcacagagtcacc

SEQ ID NO: 555547 - DNA, 201 bp, Homo sapiens
acgccaccagcagtcgtgcacactctccgggaaacgaggggcagtagtgtcctcaagatgctgaagtcattgacgaagaagaagaagtcactggtgggctrtgaggcaactcgcttcagctcctcagggtcagcattcttgatccctgaagtgacgacccatcaggactcagtcacccacatgctctctgactgcccccac

SEQ ID NO: 555548 - DNA, 201 bp, Homo sapiens
cctgtagaaacctccccttgccccataccaggcttaccttttctcctttgggtccagcaacagcaggtccctgaaaacaaacaggacagatacagcttggmcctgccttggggttgtatgatcaaagtcttcattggaatggaggtcacatggaattggaagtcatacagctcagtccccgcccagaagtcacagagtcac

SEQ ID NO: 555549 - DNA, 201 bp, Homo sapiens
gatgtcggggatcgggtgagggtagtaagggggaaaagggggtaacatgaaagtctggtctcaccggtaatccagggggaccagaggggccagggaggccytgttctccacggaggcctggaagcccctggaaaaagtctttgttaagatttatagggcctctgagatatcccttggggcacaccccatggactaagagga

SEQ ID NO: 555550 - DNA, 201 bp, Homo sapiens
tgaccatataaagtcatgggccagcatgtcctagcacatgtcacaggtcagagccatccatgtgtgtctcaccatgtctcaacacaggtccacatgcggtmttgggtccatgtcttagcacatgagtctgggtggaagtgtctgggtatcaacatgtctctaagtgccccaaatgtggctacacaccagtgtgtttgtgcc

SEQ ID NO: 555551 - DNA, 201 bp, Homo sapiens
ctggtctgtttgcacatcttggcccatgtctgcatatgggcatgggcttatacatgtctccaaagagcatgggcttatacatgccttgagagccatgtgtmttggcatctgtctgcaactcttgtgtgtagctcaatgtgtatgaccataagcgtgtgggtgaccatataaagtcatgggccagcatgtcctagcacatgt

SEQ ID NO: 555552 - DNA, 201 bp, Homo sapiens
tccaatactcacttctctcccagaggcgcctgaatctcctttctctccctaaggaagacaaggatgcttcaggcatggctccaagcagagaccagagagamcccaggtgggggactttaccttcctcccgtcttctccagggtccccaggttctccctgtgggcagaggactcacatcagcccaaacattcactggtgtct

SEQ ID NO: 555553 - DNA, 201 bp, Homo sapiens
ctccaatactcacttctctcccagaggcgcctgaatctcctttctctccctaaggaagacaaggatgcttcaggcatggctccaagcagagaccagagagrccccaggtgggggactttaccttcctcccgtcttctccagggtccccaggttctccctgtgggcagaggactcacatcagcccaaacattcactggtgtc

SEQ ID NO: 555554 - DNA, 201 bp, Homo sapiens
atagtcaataggagccctcaggtcccaggccatggctctggtttgccccaggctcaactctgcccccaagttccccgaagcaccccaatgccagcccccarcaggcatgggtggccatccatgcttcccacctggacctccagaccccttgtgtgaaggcacactggcagcagcgccaggggaccctccatcccttctgag

SEQ ID NO: 555555 - DNA, 201 bp, Homo sapiens
ccgctccggccatccagcccagggggaccccggtcaccctgtggaaaatagagtggtaagaggccaccaaggctgaggtggatctgataacccaggctcaygtcctgagaaacccccacaccctctcaccttttctcctgctgggcctcggacacctgggtccccctggagggaacagggtcagataagaggtgagggtaa

SEQ ID NO: 555556 - DNA, 201 bp, Homo sapiens
gcacacacgggcctgcacacacacatccacatacaaccacacacagacacaggcacacacaggcacacacagacacaggcacacacaagcaggcacacacmgagaggcacacagacacaggtacacacaaacacacacacacagacatgcacacacacagcagcagcagcacctagcggagggtccggagcctggggccag

SEQ ID NO: 555557 - DNA, 201 bp, Homo sapiens
gggggattctactaaaacctgtgtgccagggactgagaccctcccaaaggcaaggctgaaccgaccccccaccaactctctcggatgctgtgactatgatratctggttggagcttacgcagccccgagccccctctgtcccagcatctcccctcacttacgtctctccctgggtccccagctttgcctgcagcaccctga

SEQ ID NO: 555558 - DNA, 201 bp, Homo sapiens
tcctttgatgcctggcacaccctgaaggcagagtgtcgtgccctgagcccccagtccctgccacgtgcccaggtgcatatgcacaccacctctagtgtgcscccagaaaggagggggactctatggaagggtggagagaggcctcaccctgtctcctttgggaccttggtcaccattgctgcccggctccccctgtgggga

SEQ ID NO: 555559 - DNA, 201 bp, Homo sapiens
cctagagcccctcctctcggccactccatagtcagccacagaaccccttccccctgaaccccagaaagcctcctcctgtcctcccctcctgccctcacagwtgctgtggaaccaccacagccacaggaccccacagagagtacaccaccctcttccctgtaccttgtcaccagggtccccattgtctccccgaggtccttt

SEQ ID NO: 555560 - DNA, 201 bp, Homo sapiens
tggccagcccccagcctcaccctctctcctggccttcctgcctctcccacacccccagccctgcctgggagcccgggaataccaggctttccaggctccchggcaaggccggaaggcccgggggggcccctctccccaagggccagaccaggtggcccctgagggccagggtctccacggtcgcccttcagcccgcgttct

SEQ ID NO: 555561 - DNA, 201 bp, Homo sapiens
caaagagaatcgccctggatagtgggtagggaacaccatggggtgggagtcacctctggaggccagagccactggggcttgccatggggacaagggtcacsataggcaggggacaccatcataggcggctactgtggaggtgggggaccctgggtgacatgaggacaccatgagagcactgggtcactataaggtcaaaag

SEQ ID NO: 555562 - DNA, 201 bp, Homo sapiens
cctcttccctcactctcctggccagcccccagcctcaccctctctcctggccttcctgcctctcccacacccccagccctgcctgggagcccgggaatacyaggctttccaggctccccggcaaggccggaaggcccgggggggcccctctccccaagggccagaccaggtggcccctgagggccagggtctccacggtcg

SEQ ID NO: 555563 - DNA, 201 bp, Homo sapiens
tagcgggtgagggccaagcccatggggggtcccacccctcccaacccctcttccctcactctcctggccagcccccagcctcaccctctctcctggccttyctgcctctcccacacccccagccctgcctgggagcccgggaataccaggctttccaggctccccggcaaggccggaaggcccgggggggcccctctcccc

SEQ ID NO: 555564 - DNA, 201 bp, Homo sapiens
taccttgcggagtctgccacagccctgcccccaatggtccctaacttcctcctggggacacctctcaccctcaggttgccagtgcagaaggaagccctgckctctgggcaccggctcccagcgcagcctcagcgagtgctccccgcgctgcaccacgtgaagcgtccccagggctggcggagcctcaggcgctggagagaa

SEQ ID NO: 555565 - DNA, 201 bp, Homo sapiens
gcttcctggtcactagtcacaggactaaggcagggatggggtgatcaccttggggccagggggtccggggggcccaggggttccagggagtccaggagggycatctctgccctgcaggaaacaagaaaatggggtggcagccccagcacagcctccagacagcctgccccacgaagcccatcgcagcccacctgttctcca

SEQ ID NO: 555566 - DNA, 201 bp, Homo sapiens
taagggtggcttcctggtcactagtcacaggactaaggcagggatggggtgatcaccttggggccagggggtccggggggcccaggggttccagggagtcyaggagggccatctctgccctgcaggaaacaagaaaatggggtggcagccccagcacagcctccagacagcctgccccacgaagcccatcgcagcccacct

SEQ ID NO: 555567 - DNA, 201 bp, Homo sapiens
ctaagggtggcttcctggtcactagtcacaggactaaggcagggatggggtgatcaccttggggccagggggtccggggggcccaggggttccagggagtycaggagggccatctctgccctgcaggaaacaagaaaatggggtggcagccccagcacagcctccagacagcctgccccacgaagcccatcgcagcccacc

SEQ ID NO: 555568 - DNA, 201 bp, Homo sapiens
accttcttgcacatgtgtggctgttgggcaaggacttaccgggttgccgtcctgacccctcggtccaggctctccccggtctcctttgatgcctggcacaycctgaaggcagagtgtcgtgccctgagcccccagtccctgccacgtgcccaggtgcatatgcacaccacctctagtgtgcccccagaaaggagggggact

SEQ ID NO: 555569 - DNA, 201 bp, Homo sapiens
ccagcccctcacccgctctccactagggcctggctgacccatctctcctcgagggcctgtctgacccgggaacccaacaacaccaggagcaccgggcaggycagggaggcccagatctccctgaaataaaaacagcaaagggagggaatggtcaatgcaggacccctcccaggactctcatcagaactccctcttcctcct

SEQ ID NO: 555570 - DNA, 201 bp, Homo sapiens
cctgcctgcccctccccagaccccgctgggcgcagccccccattctcaccatcactatcccaaggagcttcagggtcctggtactcctccacagaatactmggagtattcagagtactcatcatcctcagggggtacccgctctgcaggtagggcagggtgtgctgggagcagtggctgctggccccggggcaaggtgggc

SEQ ID NO: 555571 - DNA, 201 bp, Homo sapiens
ggatgcagccagcatcagcaccctgagacctcagaaaagagtggagtcatattcccccagggtcagggtcaggggtcagaggttgcagaaaactccaatastcacttctctcccagaggcgcctgaatctcctttctctccctaaggaagacaaggatgcttcaggcatggctccaagcagagaccagagagaccccaggt

SEQ ID NO: 555572 - DNA, 201 bp, Homo sapiens
gctggctctggacctgggcctgggcctgggcctggggcagaacttgcctggggtcccaggagtccacgcagtcctggcaacccggctgagcccttgtcacsaggctctcccttgctgccctgtgggagtgaccaggagagggattcagtcaggaccagatcaggctgggggcttagaatacaacgagcccgccagctgggg

SEQ ID NO: 555573 - DNA, 201 bp, Homo sapiens
cctgtgaaggatgcagccagcatcagcaccctgagacctcagaaaagagtggagtcatattcccccagggtcagggtcaggggtcagaggttgcagaaaastccaatactcacttctctcccagaggcgcctgaatctcctttctctccctaaggaagacaaggatgcttcaggcatggctccaagcagagaccagagaga

SEQ ID NO: 555574 - DNA, 201 bp, Homo sapiens
gacccagtgccctaatatctgaccccaggtccctcgcccttcaacattaggccttcctgaccagaaaaaaaccaatcttgtttctttcctaccttgaggcmccggggacccatgaagccaacatctcctttttctcctcggataccaggcactccatcctttcctggggatccctagcagggagagggtccatgtgaggtc

SEQ ID NO: 555575 - DNA, 201 bp, Homo sapiens
ctagagcccctcctctcggccactccatagtcagccacagaaccccttccccctgaaccccagaaagcctcctcctgtcctcccctcctgccctcacagawgctgtggaaccaccacagccacaggaccccacagagagtacaccaccctcttccctgtaccttgtcaccagggtccccattgtctccccgaggtcctttg

SEQ ID NO: 555576 - DNA, 201 bp, Homo sapiens
atgaccatggcttcaactcacccgctcccctttctcgccctggtcacccttggggcctggctgcccgtcaaagcctcggtcaccctgggaacagaagaagsatgagagaccttctgccctgacctccctcagctctggaacctccctgaactcccatgagctccctggcctaatgcccaaaccttctgtaacccaagcacc

SEQ ID NO: 555577 - DNA, 201 bp, Homo sapiens
catgaccatggcttcaactcacccgctcccctttctcgccctggtcacccttggggcctggctgcccgtcaaagcctcggtcaccctgggaacagaagaakcatgagagaccttctgccctgacctccctcagctctggaacctccctgaactcccatgagctccctggcctaatgcccaaaccttctgtaacccaagcac

SEQ ID NO: 555578 - DNA, 201 bp, Homo sapiens
atacagggactatggtgagactgcatggagccagggcccaggggtcagggtgctgggtgagggaggtagggccccagcccacccaggcccacccaggcccwcccaggcccatccaggcccacactcaccgtcagtgcagcttctcccttctcgcctcgaggaccggcaggccctggccgcccctatgtgcaacagatggga

SEQ ID NO: 555579 - DNA, 201 bp, Homo sapiens
ctttaatgccccccagaatcagcaccatgtcatcacaggcttgggtcaaggggcgggtcagacgccagtcacatccgctcactgcccacagccaccccccsacagtgagtcatctgccagggtggcaggagccacaatgggggtttgtccacaggggggaaggctagacccacgggaccaagtcactgaaataacggacgt

SEQ ID NO: 555580 - DNA, 201 bp, Homo sapiens
aggagagactcaaagtcagttcatcatggtcatggggtcaggggctctagtccctgtgagcctaaggcctgcatggcaagaacatgccccacccaggcagrgctctgggagaagacacagacaacaggtctcgccccagagctcgtcaaggccaagaccaaccaatgaggctggggtctagggtcctcatgtgaaggggta

SEQ ID NO: 555581 - DNA, 201 bp, Homo sapiens
gcccccagcctggtcagccccctcaccacgccccctacccaacatccgcactcaccttggggcccgtgcctcctgggacaccaggaaaaccctgagatacrgcagaacacaaaggggtcacaaaggcccatggcttcccaggagggttgcccattgaaacatcatggcttctaatgctctgaagtcccagaatgacccagg

SEQ ID NO: 555582 - DNA, 201 bp, Homo sapiens
ggggtactggggtcgggggttaggtgaatggggtcagaggctggcagaattgctcactggtccgagctgtcccgctcacagcctccccgatgctgttggcktagagggcaatcacagtcacttggtactcggtcagtggccggagaccccgcagccgcacactggtctcaccagctgggacgttcacctgcccagggcaag

SEQ ID NO: 555583 - DNA, 201 bp, Homo sapiens
gtgccccggcccaagagtggccccttatgcccgccatcacactcctcaggccaggctcgcccttgcctaggccccggactcacatcttccccagggtctcygggctcccctgcacggccagcttcaccctgcacagaatggcaggtgaggggtgtctggactgagccttctctgctcagtagtcaggccccagggccaacc

SEQ ID NO: 555584 - DNA, 201 bp, Homo sapiens
gcgggatcaggggatcaggcaggaggattggggtgggcatgtatgatgcagagttggggtcggggtcaggagcacataggatggaatcagcactgccaagkggggattggggtccggggtctaggtcagggtacaccgtgtgggcaggaactcacgaggtcgggtcacaggcacgccaccagcagtcgtgcacactctccg

SEQ ID NO: 555585 - DNA, 201 bp, Homo sapiens
taccagagctctcatcccaggtctccacgatctcccgcagggcagatgcctgagggacagcaagaggtcagaggagcggggtgcgtcgccgcagcccctaygcctgtgggcaccactagccccaagggcccccacttgtccctacccccagcccctaaacaacccaccttgatgccagcagtttccagcaaccgatccaca

SEQ ID NO: 555586 - DNA, 201 bp, Homo sapiens
gctcctccctgggacatcccggccgcctcccttcccccttcacctaccggctccccctttgggcctcgaggtcctcgctctccctgaggacgaaacagagsagagggtggtgcttgggctcaggcgaatgtcaacgtgggcactgcaccaccaccccaggctcccaccctgtggaagaaccctgggaagacacttagagag

SEQ ID NO: 555587 - DNA, 201 bp, Homo sapiens
ggggtcctgggtcccccagtggtccacgaggtccaggggggccctgatggaggagacaaagtataaggtgcaaccccacagacctcactctcgcccccctsgtgttggtccccccactacacatcacttgcctccacataccctgcacttaccgatggtccagggtcccctttccgcccaggaagcccaggtccttcacct

SEQ ID NO: 555588 - DNA, 201 bp, Homo sapiens
gaactgaggcgtcatggtgaggatgggggtaatcaaagggtcacaagggccagagtaactggcaggggttatgtgggttcaaatggggtcaccaggtctcygcatcacatggcactcatgaggctgtcaccttcatggctgttccaggaagccctggggggccacggggtcctgggtcccccagtggtccacgaggtccag

SEQ ID NO: 555589 - DNA, 201 bp, Homo sapiens
gtgcacgctcccctcaattcaccatgaccatggcttcaactcacccgctcccctttctcgccctggtcacccttggggcctggctgcccgtcaaagcctcrgtcaccctgggaacagaagaagcatgagagaccttctgccctgacctccctcagctctggaacctccctgaactcccatgagctccctggcctaatgccc

SEQ ID NO: 555590 - DNA, 201 bp, Homo sapiens
tcagaggttggggcaggcaggctggaagatggttatgaggttggaagggtagggaaggttcagggatcaggagtcagagctggggccccttaccttctggscctgaagtccttcggggcctctgggaccaacactgccaggtggccctgggggaccagcagagccatcatttccactggggcctgggaagcccccaattcc

SEQ ID NO: 555591 - DNA, 201 bp, Homo sapiens
tcaccccgatctctgacccaagccttggaatccctactcacctgctcccctctctcgccaggagctccagggaccccaggagcccccaccactctctctcyggggggacctcgctcaccctgtcagacacagggaccaagtgagcagggtcagaggcagtggggatcagagtcaggcaggttgggggccacagcttcagag

SEQ ID NO: 555592 - DNA, 201 bp, Homo sapiens
cattctggggacaaagtctgggtgaagggctgcccatgacagagaagctcctgccttctgccccgcacggcctcaggaaagcaccttcacacccttttccytaggcctcttgcccagagcaccctttagcacttggttgaggcatggctggagactcctgggagcccctttctggtgtgtccccactgcccaagttccctt

SEQ ID NO: 555593 - DNA, 201 bp, Homo sapiens
actgggacatcatcaagtcagccttcctactttttctcctttctttccaggggggccaacggggccttggggtccagggcttccgggaagaccctaggaakaagtgagtaaaaatatgagccaagaactatgaagcccagcacccaaccactgccccaggagagacccacacccctgagcagggcccccagcagagcctca

SEQ ID NO: 555594 - DNA, 201 bp, Homo sapiens
ttccaaacctgagtagtgaaggatgcctgacacagggctgtggccagaccactgactgcctggtccaggcttggcccatcatccacggcgaagaaggtctrgacagagtccatacccggcgccaagcgacgcagctgctctgggtccgctccagccattcccaacatcaccacattaagccctaaggtggggtccagtggc

SEQ ID NO: 555595 - DNA, 201 bp, Homo sapiens
cacaaagagctcatgacctgcatggcggtcttggggtcacaggatcatagccaagagtctgggggcaggttctagcagaaggagagccgcagagctcccarcctgctcacgggcccagcactgtggaatcacagcccagatagtgttctataggagggtcactgctcaagggctgtgctgtgctcagagcgccatcctccc

SEQ ID NO: 555596 - DNA, 201 bp, Homo sapiens
accctgtgagaaacacagatgggggagcccttcagtgggactgtccccaacactggcccatccgctgcatgtgtggccactcagatgctcagcggccaggkcccaggccacacacagatcccgggtgaacacacatggggccggcagcaagggagccagaacccccagcacttaagaggacccccaggatatgtgtgtgtg

SEQ ID NO: 555597 - DNA, 201 bp, Homo sapiens
ggaccagagtgaggcaggcagctgtcctccacaagcctcctgcagtactcaccccggcggacagtgaggacactggcactgccctcacggggacccactcragcagacacccgcacagtgtagctaagcccagcctgaacgtcatccaagtcgaatgctgtctgactcccaggaagcaccagggtccgctcaacccctaag

SEQ ID NO: 555598 - DNA, 201 bp, Homo sapiens
ggttaaggttggggtgaggagtcataggctgggactcacatttcgtccatcctctccaggatctccctggtctcccttttcacccacaggcccccgaactscaggtgccccctaagaagagcagctggcctgagacagaccctcccaatattttgcaggtgcccctatgacccgctacactgccccaggttccccattact

SEQ ID NO: 555599 - DNA, 201 bp, Homo sapiens
gggagcccgggaataccaggctttccaggctccccggcaaggccggaaggcccgggggggcccctctccccaagggccagaccaggtggcccctgagggcyagggtctccacggtcgcccttcagcccgcgttctccaggaaagccgatggggccctgcaggagtggaagagagaatgctggtggctgtacagctacaccc

SEQ ID NO: 555600 - DNA, 201 bp, Homo sapiens
ccagtgccctaatatctgaccccaggtccctcgcccttcaacattaggccttcctgaccagaaaaaaaccaatcttgtttctttcctaccttgaggccccrgggacccatgaagccaacatctcctttttctcctcggataccaggcactccatcctttcctggggatccctagcagggagagggtccatgtgaggtcaga

SEQ ID NO: 555601 - DNA, 201 bp, Homo sapiens
tgagcagtcccagccaggaaggacaggggtggcgtcagggagccataccttcactccggccccaggccagtctgtaagctgtggctccagtgacccctacycaggtgatccgtagaacgtcgctggaagcattgaggatctgcagcctcgacacacgacccacaggctcaggggctggggacagaggcaaggtaaggggtc

SEQ ID NO: 555602 - DNA, 201 bp, Homo sapiens
gggcacaggcaggaagctaccagagctctcatcccaggtctccacgatctcccgcagggcagatgcctgagggacagcaagaggtcagaggagcggggtgygtcgccgcagcccctatgcctgtgggcaccactagccccaagggcccccacttgtccctacccccagcccctaaacaacccaccttgatgccagcagttt

SEQ ID NO: 555603 - DNA, 201 bp, Homo sapiens
ccaaagagaatcgccctggatagtgggtagggaacaccatggggtgggagtcacctctggaggccagagccactggggcttgccatggggacaagggtcascataggcaggggacaccatcataggcggctactgtggaggtgggggaccctgggtgacatgaggacaccatgagagcactgggtcactataaggtcaaaa

SEQ ID NO: 555604 - DNA, 201 bp, Homo sapiens
actggggcctgggaagcccccaattcctggggttccctggggagatataggacagagtcagtaatcagaggccccagagatggaccctctcccaaagtgcwcgctcccctcaattcaccatgaccatggcttcaactcacccgctcccctttctcgccctggtcacccttggggcctggctgcccgtcaaagcctcggtca

SEQ ID NO: 555605 - DNA, 201 bp, Homo sapiens
tcacagatctcaggatcacagagggttatagggtcagaaattccagggttatggcacacactaccatatttctggggaccaagctaagggtggcttcctgstcactagtcacaggactaaggcagggatggggtgatcaccttggggccagggggtccggggggcccaggggttccagggagtccaggagggccatctctg

SEQ ID NO: 555606 - DNA, 201 bp, Homo sapiens
ggatcgggtgagggtagtaagggggaaaagggggtaacatgaaagtctggtctcaccggtaatccagggggaccagaggggccagggaggccctgttctcyacggaggcctggaagcccctggaaaaagtctttgttaagatttatagggcctctgagatatcccttggggcacaccccatggactaagaggaccccaaaa

SEQ ID NO: 555607 - DNA, 201 bp, Homo sapiens
ggggcaagacaggtgaaggttcttgggtactcaccactgggccaggggggcctcttggaccctgcagaccctacatagagagggcactgatgagcctcaawctgggcctcacttgggcctgttcccaacctctgggggctttttccttgggggtcaatttccatacctcaccctttccagtcacagataatacctacccat

SEQ ID NO: 555608 - DNA, 201 bp, Homo sapiens
tgggagcccgggaataccaggctttccaggctccccggcaaggccggaaggcccgggggggcccctctccccaagggccagaccaggtggcccctgagggycagggtctccacggtcgcccttcagcccgcgttctccaggaaagccgatggggccctgcaggagtggaagagagaatgctggtggctgtacagctacacc

SEQ ID NO: 555609 - DNA, 201 bp, Homo sapiens
acaggacagatacagcttggccctgccttggggttgtatgatcaaagtcttcattggaatggaggtcacatggaattggaagtcatacagctcagtcccckcccagaagtcacagagtcaccgctgacagcagggaaggggttatacaaaatggactgacacaaagagctcatgacctgcatggcggtcttggggtcacag

SEQ ID NO: 555610 - DNA, 201 bp, Homo sapiens
caccctctctcctggccttcctgcctctcccacacccccagccctgcctgggagcccgggaataccaggctttccaggctccccggcaaggccggaaggcscgggggggcccctctccccaagggccagaccaggtggcccctgagggccagggtctccacggtcgcccttcagcccgcgttctccaggaaagccgatggg

SEQ ID NO: 555611 - DNA, 201 bp, Homo sapiens
ctgggccaggggggcctcttggaccctgcagaccctacatagagagggcactgatgagcctcaatctgggcctcacttgggcctgttcccaacctctgggrgctttttccttgggggtcaatttccatacctcaccctttccagtcacagataatacctacccatggactgcctctcatagatagcacacacgggcctgca

SEQ ID NO: 555612 - DNA, 201 bp, Homo sapiens
cccagcctcaccctctctcctggccttcctgcctctcccacacccccagccctgcctgggagcccgggaataccaggctttccaggctccccggcaaggcyggaaggcccgggggggcccctctccccaagggccagaccaggtggcccctgagggccagggtctccacggtcgcccttcagcccgcgttctccaggaaag

SEQ ID NO: 555613 - DNA, 201 bp, Homo sapiens
tggacacaggacgacatgagagaacatgggccccaaggagtgaaaacacggtgtccctacaggggccacagggactcactcaccacaaggcctgaagggcmggggggtccaggaagtcccacagctccagtaggtccagtcaggccctggaggaagagaaagttcagggcagtgccaaccccacccatctccctatgaccc

SEQ ID NO: 555614 - DNA, 201 bp, Homo sapiens
agttctggggagaagcaagggtctgcaagggaaggcatgggggtctgaaagagcaatggaggcagagagccaagggacgggggcagggcctgacccgttcragccacgatgactgcagcagggccctcctctctgcctcgcagtaccgacacagccacctggtaggtggttccaggctgcagccctgtgatgtctgtggca

SEQ ID NO: 555615 - DNA, 201 bp, Homo sapiens
ccttggactccggtagctcctctgggcccagcgggccccacatctccctggaggtgacaaagaccatcagtgctagtcccaggctccagttaaccccctgrcccagcaagtcctgtgaccccccaagtcccatagataggccctatgacctagacctcaaccctgtagaaacctccccttgccccataccaggcttacctt

SEQ ID NO: 555616 - DNA, 201 bp, Homo sapiens
ataagcttgctgaggaacagccttgaagccaagccatgcccaaggtagaacctgctgggaggggcactggggtctttcttaccctccacccacagaccctrataccttctctctggctccaggtcctgtgtctacctgtggggggaatgaccagtgagaagaatggctcaacaaggggaagaggagttggcgaggggatac

SEQ ID NO: 555617 - DNA, 201 bp, Homo sapiens
gggctccagggaggccaggatcacccttgggccctcgaggaccctcttgtccgcggtccccaggctctccctgtggcagagataagcttgctgaggaacakccttgaagccaagccatgcccaaggtagaacctgctgggaggggcactggggtctttcttaccctccacccacagaccctaataccttctctctggctcc

SEQ ID NO: 555618 - DNA, 201 bp, Homo sapiens
aacaccacatccgccaggccacgggggcacactgtaggaaggggaacaagttactgaagcgggcagcccacccagacacacctttctgcccttcccactaygcccactatacctggcgtctgtgtgacagatgcctcaggaccccgcacaccatccaggacaggcgtcagggagaagatgtaagagacgccaggctctagc

SEQ ID NO: 555619 - DNA, 201 bp, Homo sapiens
gggcaccaagctcccagtggatagccccaggagtccatgcctgctgcagtcctcacccaggttgttcccacttgggtccatgtagggcatgtcacggatcytttgcaagataatgccaaggtcatgggagccattcagtgggaacagtggggagggccgatgactgtaagacagcaggccaacctggggtggaaggaaaca

SEQ ID NO: 555620 - DNA, 201 bp, Homo sapiens
gacacaccctgttgacagttcagggctcagtgccatcttgggaagcagatggataacgagacagggaggagactatagggacccaggtgtggaaggagagsgctggaggtacactcagacccctcaggctggaacttcagtgtgtgtggtgggggtgctggctgcgtccacctcaccctgggtgctgcgcacaatgatgcg

SEQ ID NO: 555621 - DNA, 201 bp, Homo sapiens
acgatggcagtgatggacagggacgcagagtgagaagggccatgggggtggggatgtggggtggtggggaccagagagctgggatatggctgaaaaaagtsagtgcaagacaaggacataggatgaaaggggccagtgatggtcagggacactggaggacaggagtctgtgggatcttagcatgtaggatgacaggagtca

SEQ ID NO: 555622 - DNA, 201 bp, Homo sapiens
gagagaagtcagggtaggtgggcaggggtcagaaagagacagggatgtgggacgatggcagtgatggacagggacgcagagtgagaagggccatgggggtkgggatgtggggtggtggggaccagagagctgggatatggctgaaaaaagtgagtgcaagacaaggacataggatgaaaggggccagtgatggtcagggac

SEQ ID NO: 555623 - DNA, 201 bp, Homo sapiens
cgtggcctccccagaaaccaactgggatttctctgggcctgggaacagggatggaggcagctccagggctagcaaactctgtgccccagagccccacctgracccccaataaacccccagcccccattccaccctgacctgccccctcccaaaccccagtccccaccgtgggctgagtgccaggaaaccctgtatcctgtg

SEQ ID NO: 555624 - DNA, 201 bp, Homo sapiens
ctgctcctccctgggacatcccggccgcctcccttcccccttcacctaccggctccccctttgggcctcgaggtcctcgctctccctgaggacgaaacagrgcagagggtggtgcttgggctcaggcgaatgtcaacgtgggcactgcaccaccaccccaggctcccaccctgtggaagaaccctgggaagacacttagag

SEQ ID NO: 555625 - DNA, 201 bp, Homo sapiens
gtcgacccttgacccctggagcccaacccttgacccccagaactcaccacttgtccaggcaaacctggagacccctgtggaccctgacggagaacaagtcrgatgtcagggtgacaatggacacaggacgacatgagagaacatgggccccaaggagtgaaaacacggtgtccctacaggggccacagggactcactcacc

SEQ ID NO: 555626 - DNA, 201 bp, Homo sapiens
ggaataccaggctttccaggctccccggcaaggccggaaggcccgggggggcccctctccccaagggccagaccaggtggcccctgagggccagggtctcyacggtcgcccttcagcccgcgttctccaggaaagccgatggggccctgcaggagtggaagagagaatgctggtggctgtacagctacaccccactccacg

SEQ ID NO: 555627 - DNA, 201 bp, Homo sapiens
ggtcccacccctcccaacccctcttccctcactctcctggccagcccccagcctcaccctctctcctggccttcctgcctctcccacacccccagccctgmctgggagcccgggaataccaggctttccaggctccccggcaaggccggaaggcccgggggggcccctctccccaagggccagaccaggtggcccctgagg

SEQ ID NO: 555628 - DNA, 201 bp, Homo sapiens
ccaagccacccctagcacaacctgtccctcacttacccgctccccacgatcgcctttgtcaccctagaaaacagatgacgaccccatgaccctgggccacrcctcactcccaaagataccaggagtgatgagggtcatggggtccaattggatttcaaggattttgggagaactgaggcgtcatggtgaggatgggggtaa

SEQ ID NO: 555629 - DNA, 201 bp, Homo sapiens
ctcccaacccctcttccctcactctcctggccagcccccagcctcaccctctctcctggccttcctgcctctcccacacccccagccctgcctgggagcchgggaataccaggctttccaggctccccggcaaggccggaaggcccgggggggcccctctccccaagggccagaccaggtggcccctgagggccagggtct

SEQ ID NO: 555630 - DNA, 201 bp, Homo sapiens
ggacacaggacgacatgagagaacatgggccccaaggagtgaaaacacggtgtccctacaggggccacagggactcactcaccacaaggcctgaagggcckgggggtccaggaagtcccacagctccagtaggtccagtcaggccctggaggaagagaaagttcagggcagtgccaaccccacccatctccctatgaccct

SEQ ID NO: 555631 - DNA, 201 bp, Homo sapiens
acacaaagagctcatgacctgcatggcggtcttggggtcacaggatcatagccaagagtctgggggcaggttctagcagaaggagagccgcagagctcccrgcctgctcacgggcccagcactgtggaatcacagcccagatagtgttctataggagggtcactgctcaagggctgtgctgtgctcagagcgccatcctcc

SEQ ID NO: 555632 - DNA, 201 bp, Homo sapiens
tggagagacaggacccccagaacatctgctgtcagaagttccctacttaccggctcacccaccaggtctccagcaaggcctccaggggctccctggtaagsgggagaggtcagtgggattccttggcccccaccagttgaccccccctcactggcagccccacacacactcaccttctctccctttgctccagggagcccg

SEQ ID NO: 555633 - DNA, 201 bp, Homo sapiens
ccctcttccctcactctcctggccagcccccagcctcaccctctctcctggccttcctgcctctcccacacccccagccctgcctgggagcccgggaatahcaggctttccaggctccccggcaaggccggaaggcccgggggggcccctctccccaagggccagaccaggtggcccctgagggccagggtctccacggtc

SEQ ID NO: 555634 - DNA, 201 bp, Homo sapiens
gaaggccgagtggagcggagggtggcacggtgcagtgccccgggccgggtcctcccttgcggtgcccacctctctccctgtgctgggctcgcactcggggsgcctctgccaggatcccggcgcagagcgcggccaccagaagccgcagcgtcatcctaggcagtaaaagccgtcagctaggacccccgcctctgtcccttg

SEQ ID NO: 555635 - DNA, 201 bp, Homo sapiens
ccatgcccacactcaccttgtcaccctttagtcctgcactcccaacatcaccctattgggcaaaagagtgtgagtcccgcccaaactggggaggccccgcrcctgaattctaatatcatacaagatccactcacccccccactcatgccaggaccttccccacgttcctaccttctccccacgctctcccctgctgccagg

SEQ ID NO: 555636 - DNA, 201 bp, Homo sapiens
gcatcactcacctgtgggcctgggggtccccgaaacccttcaatgccctgaggataggggaggaagaaatcagagcaggccctcccatgcctgcacccccraggaccaatcacactcaccctttccccaggggctccagggaggccaggatcacccttgggccctcgaggaccctcttgtccgcggtccccaggctctccc

SEQ ID NO: 555637 - DNA, 201 bp, Homo sapiens
ggccagggaggccctgttctccacggaggcctggaagcccctggaaaaagtctttgttaagatttatagggcctctgagatatcccttggggcacaccccwtggactaagaggaccccaaaaagatctccctccagggtagagacccccaggactgagaggtcccattgagatccctcaggcacagaccccatggatgggg

SEQ ID NO: 555638 - DNA, 201 bp, Homo sapiens
ggacacactcacgttttttccattcaggccaggtttgccatcctcgcctggctttccctgtgggaacagatcactggttggatgtcggggatcgggtgagsgtagtaagggggaaaagggggtaacatgaaagtctggtctcaccggtaatccagggggaccagaggggccagggaggccctgttctccacggaggcctgg

SEQ ID NO: 555639 - DNA, 201 bp, Homo sapiens
tgctacagatcttggctgtgtaggtgtgctggcgtttcttggcaggtttcgccgcagctgccctggacacactcacgttttttccattcaggccaggtttsccatcctcgcctggctttccctgtgggaacagatcactggttggatgtcggggatcgggtgagggtagtaagggggaaaagggggtaacatgaaagtctg

SEQ ID NO: 555640 - DNA, 201 bp, Homo sapiens
ataccaggctttccaggctccccggcaaggccggaaggcccgggggggcccctctccccaagggccagaccaggtggcccctgagggccagggtctccacvgtcgcccttcagcccgcgttctccaggaaagccgatggggccctgcaggagtggaagagagaatgctggtggctgtacagctacaccccactccacgggg

SEQ ID NO: 555641 - DNA, 201 bp, Homo sapiens
cctacctcctgccgctcactcggcagtggctgtcccagccccgtcagaggagtgtactggaccttgtagccagtcacagggccactggccgctgtccactrtactctcaaggattggctgcttggctcagacagcaccaggtctcgtggagcagaggtcgagtcatccgctgggaatgcgggatcaggggatcaggcagga

SEQ ID NO: 555642 - DNA, 201 bp, Homo sapiens
gagcagtcccagccaggaaggacaggggtggcgtcagggagccataccttcactccggccccaggccagtctgtaagctgtggctccagtgacccctaccyaggtgatccgtagaacgtcgctggaagcattgaggatctgcagcctcgacacacgacccacaggctcaggggctggggacagaggcaaggtaaggggtcc

SEQ ID NO: 555643 - DNA, 201 bp, Homo sapiens
agagagaagtcagggtaggtgggcaggggtcagaaagagacagggatgtgggacgatggcagtgatggacagggacgcagagtgagaagggccatgggggkggggatgtggggtggtggggaccagagagctgggatatggctgaaaaaagtgagtgcaagacaaggacataggatgaaaggggccagtgatggtcaggga

SEQ ID NO: 555644 - DNA, 201 bp, Homo sapiens
ctcactctcctggccagcccccagcctcaccctctctcctggccttcctgcctctcccacacccccagccctgcctgggagcccgggaataccaggctttycaggctccccggcaaggccggaaggcccgggggggcccctctccccaagggccagaccaggtggcccctgagggccagggtctccacggtcgcccttcag

SEQ ID NO: 555645 - DNA, 201 bp, Homo sapiens
ttaccggctcacccaccaggtctccagcaaggcctccaggggctccctggtaagggggagaggtcagtgggattccttggcccccaccagttgaccccccmtcactggcagccccacacacactcaccttctctccctttgctccagggagcccgaccacagcctgtggggaatgctagtgagtttcctcctcctcccccg

SEQ ID NO: 555646 - DNA, 201 bp, Homo sapiens
agtccacagagctctcctaacctcacaccaaggccttgagccctccctagagcccctcctctcggccactccatagtcagccacagaaccccttccccctraaccccagaaagcctcctcctgtcctcccctcctgccctcacagatgctgtggaaccaccacagccacaggaccccacagagagtacaccaccctcttcc

SEQ ID NO: 555647 - DNA, 201 bp, Homo sapiens
cacacctggagggccaggaggcccaggggagcccgggaccccgactcctgggtcaccctttgaggaaaagaggcatcggatcaagctcagggagtctcacraccaggaccccagcagggacccttctgggtacacataccttgaaacctttgggtcctggagcccctttctgaccctaagaaaacccagcaaacagcattt

SEQ ID NO: 555648 - DNA, 201 bp, Homo sapiens
aataaaaacagcaaagggagggaatggtcaatgcaggacccctcccaggactctcatcagaactccctcttcctcctgtgggggcccggcctgctgccccyacaactggtgatggggcattgacttaccttcacacctggagggccaggaggcccaggggagcccgggaccccgactcctgggtcaccctttgaggaaaag

SEQ ID NO: 555649 - DNA, 201 bp, Homo sapiens
gctgttcccagcccctcacccgctctccactagggcctggctgacccatctctcctcgagggcctgtctgacccgggaacccaacaacaccaggagcacckggcaggccagggaggcccagatctccctgaaataaaaacagcaaagggagggaatggtcaatgcaggacccctcccaggactctcatcagaactccctct

SEQ ID NO: 555650 - DNA, 201 bp, Homo sapiens
gaaaggaggattgtaaacacaggaccaaggagaggttcacaagaactcaggtgtgtcctgggatctgggagatcagaccagagcacacgtgtgcccagatrtggtgagaaacagaccaaggatgggcacacagaagccaagacagggcccccagagctcagagtgtggaagccgacagtgtgtggctccctgtgatccaga

SEQ ID NO: 555651 - DNA, 201 bp, Homo sapiens
ggcggccatcttcaccctggatggtgacattaggttcattgactcagaggttggaaatcagaggcaagagctgggatgaagggagttcggctgtggagtawgacatacgtacccggatgcctggctccccacgctcgcctcggggcccaggcagccctactccagggtctccctggagaccaacaggacaccggggatcag

SEQ ID NO: 555652 - DNA, 201 bp, Homo sapiens
agggctcctggagctcatcctcattgcaggagatgacagcccaggaggttggcgcacactaccccaggcatggacacagcttgaaggagcctcctcctccyatccacacacctagactcaccttcaggccagaaggtccttggggtcctgcagggccagcaagaccctagagaaaagggtcaagggcagggaacagggctc

SEQ ID NO: 555653 - DNA, 201 bp, Homo sapiens
aggcacacacaagcaggcacacacagagaggcacacagacacaggtacacacaaacacacacacacagacatgcacacacacagcagcagcagcacctagyggagggtccggagcctggggccaggtgcttcagccaccactcaccggcttcccttcaggcccagccataccacgctctcctggtagaccctgcagagaat

SEQ ID NO: 555654 - DNA, 201 bp, Homo sapiens
ccaccttgatgccagcagtttccagcaaccgatccacattctggggacaaagtctgggtgaagggctgcccatgacagagaagctcctgccttctgccccrcacggcctcaggaaagcaccttcacacccttttccctaggcctcttgcccagagcaccctttagcacttggttgaggcatggctggagactcctgggagc

SEQ ID NO: 555655 - DNA, 201 bp, Homo sapiens
cgtcacctttctctccaacttcaccctgtgaaacatgagagtcagccctggttccaagaacccccatgatgctggcaacagccctactcccttacccgccrtgactcccccgactccagcctcttacatctcgtcctcgggggccaacaggtcctggggggccaggccgcccagggtctcccttctctccaggaggccctg

SEQ ID NO: 555656 - DNA, 201 bp, Homo sapiens
tgtccctcacttacccgctccccacgatcgcctttgtcaccctagaaaacagatgacgaccccatgaccctgggccacacctcactcccaaagataccagragtgatgagggtcatggggtccaattggatttcaaggattttgggagaactgaggcgtcatggtgaggatgggggtaatcaaagggtcacaagggccaga

SEQ ID NO: 555657 - DNA, 201 bp, Homo sapiens
tgagtcatctgccagggtggcaggagccacaatgggggtttgtccacaggggggaaggctagacccacgggaccaagtcactgaaataacggacgtgcacwcgcacgctcacgtgcacacaagcctctagcaccaaggggagggacagtggggttctgctgagaccccgactcctccaggggatgctgaatctcagctcat

SEQ ID NO: 555658 - DNA, 201 bp, Homo sapiens
gggacaccatcataggcggctactgtggaggtgggggaccctgggtgacatgaggacaccatgagagcactgggtcactataaggtcaaaagctaccacastggtgggaccaccatggtgacgggggccctctggggacagggggcccctgtgggagcaggggcatcttaccgggtcaccagggatccctgctgcaccagg

SEQ ID NO: 555659 - DNA, 201 bp, Homo sapiens
cccctaagagagaagtcagggtaggtgggcaggggtcagaaagagacagggatgtgggacgatggcagtgatggacagggacgcagagtgagaagggccakgggggtggggatgtggggtggtggggaccagagagctgggatatggctgaaaaaagtgagtgcaagacaaggacataggatgaaaggggccagtgatggt

SEQ ID NO: 555660 - DNA, 201 bp, Homo sapiens
gtcacatcagagggcagtaccaccttctgcggtggctccaagcctgcaagataacagggtcagaccagcagaggccatgccctgacccttgcctgtccatyccttcccccgcactgaccagtctcacgccgccattccaaccggtagccacgggcctcaggcaccaagttccaggaaaggaggatggatgtggggcccagg

SEQ ID NO: 555661 - DNA, 201 bp, Homo sapiens
gacccactcgagcagacacccgcacagtgtagctaagcccagcctgaacgtcatccaagtcgaatgctgtctgactcccaggaagcaccagggtccgctcmacccctaagagagaagtcagggtaggtgggcaggggtcagaaagagacagggatgtgggacgatggcagtgatggacagggacgcagagtgagaagggcc

SEQ ID NO: 555662 - DNA, 201 bp, Homo sapiens
caaccgatccacattctggggacaaagtctgggtgaagggctgcccatgacagagaagctcctgccttctgccccgcacggcctcaggaaagcaccttcasacccttttccctaggcctcttgcccagagcaccctttagcacttggttgaggcatggctggagactcctgggagcccctttctggtgtgtccccactgcc

SEQ ID NO: 555663 - DNA, 201 bp, Homo sapiens
gccaggcaaccctggagagccctgcaaatggaggccagaggcagaacagtcggagccaccccacccactcaggcagcgcccaccctgacctgcaggacaargcttgctcacctttaggccaggggctccaggggtcccaggattcccggcgcggccagggctgcctggacgcccatctgctccagggaagccctgaggagg

SEQ ID NO: 555664 - DNA, 201 bp, Homo sapiens
agcaaccgatccacattctggggacaaagtctgggtgaagggctgcccatgacagagaagctcctgccttctgccccgcacggcctcaggaaagcaccttsacacccttttccctaggcctcttgcccagagcaccctttagcacttggttgaggcatggctggagactcctgggagcccctttctggtgtgtccccactg

SEQ ID NO: 555665 - DNA, 201 bp, Homo sapiens
ccctgggggccgggagcaccggtcctgccctgaaagaagatagcagttaggtggggataagccagtcagggtgcagggacagatgtgggggacactcaccrggaggccagggtcgccaggaggcccaacttgtcctctcaggccctaggaagggtaatcagtgagacctgtgctgccaacctctcctgccccactgacact

SEQ ID NO: 555666 - DNA, 201 bp, Homo sapiens
agggccaacccacctcaccttctcgcctcgcggccctggcagtcctcggtcacctttggctccctgttgacagaggtcaggaggcaacacaggcatcagtmacagaaagatgagactccggagggaggcatggggccagagcttaaatatgcggtctactatgaaagctgagggtcatgagggtgggtaaactatgggtcg

SEQ ID NO: 555667 - DNA, 201 bp, Homo sapiens
tacagctacaccccactccacggggcacaacccactgagccacttctgctcacctccttgcctggggggccctgttcgcctgagtcccccttggggcctcracgccgttcgggcacaggcaggaagctaccagagctctcatcccaggtctccacgatctcccgcagggcagatgcctgagggacagcaagaggtcagagg

SEQ ID NO: 555668 - DNA, 201 bp, Homo sapiens
gtgcccggctgcagcccatccaactggtagcgggtcacatcagagggcagtaccaccttctgcggtggctccaagcctgcaagataacagggtcagaccarcagaggccatgccctgacccttgcctgtccatcccttcccccgcactgaccagtctcacgccgccattccaaccggtagccacgggcctcaggcaccaag

SEQ ID NO: 555669 - DNA, 201 bp, Homo sapiens
ccctagaaaacagatgacgaccccatgaccctgggccacacctcactcccaaagataccaggagtgatgagggtcatggggtccaattggatttcaaggaytttgggagaactgaggcgtcatggtgaggatgggggtaatcaaagggtcacaagggccagagtaactggcaggggttatgtgggttcaaatggggtcacc

SEQ ID NO: 555670 - DNA, 201 bp, Homo sapiens
aagtcagggtgggtcatcagcaggggaggagcacgccaaggtgaggcaggcttaccagtgcgcgcagtcacctctgcagagggcccttctccagccggccytaggacactcagcctcacgcggtactgtgtcgctggctccagcccgtccaggtgatagctgctgagctcgggccccaggacccgggactgttcctggcca

SEQ ID NO: 555671 - DNA, 201 bp, Homo sapiens
cttacctactgtcacggatcccgcagacccccagtgacagaccccgcccaccatcactgtcctcgcctaccttgcggagtctgccacagccctgcccccamtggtccctaacttcctcctggggacacctctcaccctcaggttgccagtgcagaaggaagccctgcgctctgggcaccggctcccagcgcagcctcagcg

SEQ ID NO: 555672 - DNA, 201 bp, Homo sapiens
ccgaaatccactggctccagggacgggtccccaggccaccctcactcgcgttgcatctgacaccacaacccgcagccctggaacagcaagtggagtttccrgctctaggagttacagacagaagtcagaagtcagaaccaggaccagagtgaggcaggcagctgtcctccacaagcctcctgcagtactcaccccggcgga

SEQ ID NO: 555673 - DNA, 201 bp, Homo sapiens
ggggtctgaaagagcaatggaggcagagagccaagggacgggggcagggcctgacccgttcgagccacgatgactgcagcagggccctcctctctgcctcrcagtaccgacacagccacctggtaggtggttccaggctgcagccctgtgatgtctgtggcagtagagtctgggggcagtgtctggctggactccggacct

SEQ ID NO: 555674 - DNA, 201 bp, Homo sapiens
agacagcaccaggtctcgtggagcagaggtcgagtcatccgctgggaatgcgggatcaggggatcaggcaggaggattggggtgggcatgtatgatgcagrgttggggtcggggtcaggagcacataggatggaatcagcactgccaagtggggattggggtccggggtctaggtcagggtacaccgtgtgggcaggaact

SEQ ID NO: 555675 - DNA, 201 bp, Homo sapiens
acccctaagagagaagtcagggtaggtgggcaggggtcagaaagagacagggatgtgggacgatggcagtgatggacagggacgcagagtgagaagggccwtgggggtggggatgtggggtggtggggaccagagagctgggatatggctgaaaaaagtgagtgcaagacaaggacataggatgaaaggggccagtgatgg

SEQ ID NO: 555676 - DNA, 201 bp, Homo sapiens
ccaagggccagaccaggtggcccctgagggccagggtctccacggtcgcccttcagcccgcgttctccaggaaagccgatggggccctgcaggagtggaaragagaatgctggtggctgtacagctacaccccactccacggggcacaacccactgagccacttctgctcacctccttgcctggggggccctgttcgcctg

SEQ ID NO: 555677 - DNA, 201 bp, Homo sapiens
agggcccttggcaccccccaggttgcacttaccttctctccagcctcacccaggggccctggaaagccccggtcaccctgaagagagagggtgagagaaakacagagagagagagggttggtggcggggcttgaacgtcaaaccccagacaaggggtcccaaactccaaccaccccctccaaaaccacgacctctgacctg

SEQ ID NO: 555678 - DNA, 201 bp, Homo sapiens
gagggtgagagaaagacagagagagagagggttggtggcggggcttgaacgtcaaaccccagacaaggggtcccaaactccaaccaccccctccaaaaccrcgacctctgacctggagggaactcttatctccttatcttccagcctcccctaacaccatggggagcccagagtagcacccctcacacctgaatcccccaa

SEQ ID NO: 555679 - DNA, 201 bp, Homo sapiens
ggaaagccccggtcaccctgaagagagagggtgagagaaagacagagagagagagggttggtggcggggcttgaacgtcaaaccccagacaaggggtcccwaactccaaccaccccctccaaaaccacgacctctgacctggagggaactcttatctccttatcttccagcctcccctaacaccatggggagcccagagta

SEQ ID NO: 555680 - DNA, 201 bp, Homo sapiens
atcacagagggttatagggtcagaaattccagggttatggcacacactaccatatttctggggaccaagctaagggtggcttcctggtcactagtcacagractaaggcagggatggggtgatcaccttggggccagggggtccggggggcccaggggttccagggagtccaggagggccatctctgccctgcaggaaaca

SEQ ID NO: 555681 - DNA, 201 bp, Homo sapiens
atggtgagactgcatggagccagggcccaggggtcagggtgctgggtgagggaggtagggccccagcccacccaggcccacccaggccctcccaggcccayccaggcccacactcaccgtcagtgcagcttctcccttctcgcctcgaggaccggcaggccctggccgcccctatgtgcaacagatgggaccaggctgtga

SEQ ID NO: 555682 - DNA, 201 bp, Homo sapiens
tcctctcagaccctgcccccaaaggctcactaccaatcctggtcctttctccaatccagagcacaagcccggatccccaaaccatccacaccacccatccraagctctccagcgcatgctctgcctacgcgtagtgacaacaatggagacaggtgtgccctcgcggtccccgacaagtgcagtcactcgcactgagtagct

SEQ ID NO: 555683 - DNA, 201 bp, Homo sapiens
cccataccaggcttaccttttctcctttgggtccagcaacagcaggtccctgaaaacaaacaggacagatacagcttggccctgccttggggttgtatgaycaaagtcttcattggaatggaggtcacatggaattggaagtcatacagctcagtccccgcccagaagtcacagagtcaccgctgacagcagggaaggggt

SEQ ID NO: 555684 - DNA, 201 bp, Homo sapiens
tagtgacagccctaacagcatgtgcactgtctaaatcacatcccaccatcctgaaaacttcatttcctcccactggtttccttcatacagctattctaacrattttaccagaacaccacctgaagatgcccacaccccacagctgctgtgcatgggtactcctgggccacctggcattaaggcaatggagatgagaccagt

SEQ ID NO: 555685 - DNA, 201 bp, Homo sapiens
ccccatccctcaaatggatccctgcttgtgcctgtttctctgttacaaagcttggggatcggctccttttccctttgccctgaactccctgctctgtcackgtggcccaggctcagcctagagccaagcaggagaccggtggggggtgtgtgtgtgtgtgtctgaatgtgcacaaagatgagctggctctgtcaggccctt

SEQ ID NO: 555686 - DNA, 201 bp, Homo sapiens; identical to SEQ ID NO: 404055

SEQ ID NO: 555687 - DNA, 201 bp, Homo sapiens
ctcaagtcctccacccccaggaagccctccttgcccatcctggtcttcatgaggtttctctgactcctccccagtaaagcagttggagaaaggcccagagmggggcagaaacgtgctccaggccacatagacggggtaagtctatgtggtcagggcgtccaggggctgtctatgtgaatccagtctatgagagtcagggca

SEQ ID NO: 555688 - DNA, 201 bp, Homo sapiens
gtagtcaggagtgcggcagaagcagtggtggccactgggggtgaagcagcagtacttgacagggctggagcacaggtcacagtgcagcacccccgagttcmccagcacgatggccacatggccctgagccaggtgcgcctggatgtccttcacactcactgtgctgtgggcgggaggggggtcagctggtgctgctgggcc

SEQ ID NO: 555689 - DNA, 201 bp, Homo sapiens
gagattgtggttccagctactcgggagactgaggcaagaagatcacttaagcctggggctgtagcagtgagctgtattgcaatattgcgccacagcactayagcctgtatgacagattaagaccctgtctcttaaaaaaaaaaaaaagaaaagaaaagaaaacacccagagggacagagggcagatggggctgtgggcagg

SEQ ID NO: 555690 - DNA, 201 bp, Homo sapiens
acctgctcaggatccacccctggtcagagcctgggtcatgtagccccagtgagctccataaaccaaggctcaagggggcaagtcagtgcccacagccaccygggtagccagttctgcctggctccagagtcctagcctttcctgaacaccatcccgaggcctccccactgcagatctgtgggtgagcaggcatgagaggaa

SEQ ID NO: 555691 - DNA, 201 bp, Homo sapiens; identical to SEQ ID NO: 48206

SEQ ID NO: 555692 - DNA, 201 bp, Homo sapiens
acttctctgggcttgagttcacactttgcctcctaggatgcggcccttgcattgagcttgtctgtgccctcctgtgttgcttatacgttcccaagaggcarggacctatcactgctcctggtgtctttctactccatgtgcagcagggcccatggaaggcacaatggcatgagcaaagcaggccacctgctagctaagttg

SEQ ID NO: 555693 - DNA, 201 bp, Homo sapiens
agagtgagtctccgtctcaaaaaaaaaaaaaaaaaatccatttcctttagttttttaggtgcagactggggttcaagacccagctccaccactgtcctgarcagactcccaagactgggccagctgcctcgtcagctgcctcgtctgagaggtgaaggggcaggtacttaaaccactggccaagtccctttctctgaaaaa

SEQ ID NO: 555694 - DNA, 201 bp, Homo sapiens
tgtgaacaggctgggcagctgtcggtgtcatgtgctgtgggcaaaagtccctgatgtccaggctctctggctccattttcatgacttgtgcaagaatgcarcacagtgtgtcttacatcctgcctctgtgaccctccctaggcagatgagtcttgagaatgggcagctttctcattcatctttcaggaaggtgacctttaa

SEQ ID NO: 555695 - DNA, 201 bp, Homo sapiens
aaagcttggggatcggctccttttccctttgccctgaactccctgctctgtcactgtggcccaggctcagcctagagccaagcaggagaccggtggggggkgtgtgtgtgtgtgtctgaatgtgcacaaagatgagctggctctgtcaggcccttcacggggagagcattcagctccaggtgggtccagtcaagggccact

SEQ ID NO: 555696 - DNA, 201 bp, Homo sapiens
agggccactagagcagcacacagaaaccatcctcctactgcaccccagcctggttagtgaattctttttgcccagccctgtctctcctctaccctaaatcatgtgtggtttacattgaaaactgccagccaagcatggctcagacactttcaaaaccaaatgcttctctgaaagagctattttactttttttctaaggctc

SEQ ID NO: 555697 - DNA, 201 bp, Homo sapiens
aggccaggtcgatggtccagatgctcctggtcagctgcagcttctgcagggctctctcaaactcactgtcgtccagctggcccaggtacctgcaggtagaygagctggggagctcagcttggtcttgagggtcaactggtctgagtcaccctccacccactggcccaagagccccgtcacaggtcccattccccagaagtc

SEQ ID NO: 555698 - DNA, 201 bp, Homo sapiens
cctgccttgtgctgaggacagtagaaaagaacgtaggaagtggcctctgcacattctgagggctgtagaaggcaggtggacaggagccaggactcagtacycagatcctctgggcaggcccgactgcaagggcacctgctctgactggctcccaaatcctgcctatagcctctctgctgctgctccctggtctctgcacac

SEQ ID NO: 555699 - DNA, 201 bp, Homo sapiens; identical to SEQ ID NO: 404128

SEQ ID NO: 555700 - DNA, 201 bp, Homo sapiens
gggccactagagcagcacacagaaaccatcctcctactgcaccccagcctggttagtgaattctttttgcccagccctgtctctcctctaccctaaatcatgtgtggtttacattgaaaactgccagccaagcatggctcagacactttcaaaaccaaatgcttctctgaaagagctattttactttttttctaaggctcc

SEQ ID NO: 555701 - DNA, 201 bp, Homo sapiens
tgaggcaggaggatcgcttgaacccaggaggcggaggttgtagtaagccaagatcgtgccactgcactccagtctgggcaacagagtgagtctccgtctcwaaaaaaaaaaaaaaaaatccatttcctttagttttttaggtgcagactggggttcaagacccagctccaccactgtcctgagcagactcccaagactggg

SEQ ID NO: 555702 - DNA, 201 bp, Homo sapiens
tagcaaaatagaggcctaggctggggaaaacagtgggggtgtgccttagaggggatgggggaacagcatgtgctaaggccctgaggtggggcaaatgggcwtgtggcatgcaggaccctcctccgtagccacctcatgaacctggacaaagttcagagtctaaagaggaagagacttatctctgctgttactcactcatga

SEQ ID NO: 555703 - DNA, 201 bp, Homo sapiens
attcccagagcactgctgccagccacgaggcctaccagtgggatctaggcccgagagccctccatctgacagagctggaggacctggagggctgtgggggstttaagagtctccagcggccagggctctgcatggcagggcagctgtgaggtgtgtctatgctgggtggcaggggtcagatgccctgtaatgagccacaga

SEQ ID NO: 555704 - DNA, 201 bp, Homo sapiens
tggtggttgggggaggggtgcagcctgggcagcatgaaagggtaaggcagggacctgggcagtggcgtggggcctgtggtgtgagagggaggggtggccarggtgtagaggaggctggcacagtttgcggcaggtttgcctgcatggcctgaggggtggccacagtgacaagagcccaggaggagcaggggctttggggaa

SEQ ID NO: 555705 - DNA, 201 bp, Homo sapiens
cccacctctacatacagcagccgtagggattcccattcagtttcccactgctcttggaataaggttctcatcccttaccggggccctgcctaacctggccygccagcctcatcttggctgccctcacctgtggtctagttaacctgtgaactcatcaaggcttcattctaccccaaggcatctgcacgtgaggatccctct

SEQ ID NO: 555706 - DNA, 201 bp, Homo sapiens
ggtggttgggggaggggtgcagcctgggcagcatgaaagggtaaggcagggacctgggcagtggcgtggggcctgtggtgtgagagggaggggtggccagsgtgtagaggaggctggcacagtttgcggcaggtttgcctgcatggcctgaggggtggccacagtgacaagagcccaggaggagcaggggctttggggaaa

SEQ ID NO: 555707 - DNA, 201 bp, Homo sapiens
aagcagctgtgccagtctccgagttcctgggactctgccagatgggctgaggctgcagttccacattccaaccccagcagccccaagcctgggccagggcrtcctgagcgggcccggctggggtggggatggggtccgagggcctaggcgcaccaggctcctgctgtcagctgtccaagtagacaaagaggatgtcctcat

SEQ ID NO: 555708 - DNA, 201 bp, Homo sapiens
caagggggatgaggctgaaccacctgggacagctcagctacagcttggcttagctaggtgtcgtccacggaacacactttgctggcatggctatgttggcmttatttttcaaaaggcaaaaaaaagaaaagatggtattttggttttcttctagactaccaattatatagcttaaaagctggctctcctggtgaaaagtaa

SEQ ID NO: 555709 - DNA, 201 bp, Homo sapiens
gctgggctatcttctgccaggctatgactgtccatgcctttccatgtccagctataaaatgtggcacaagacagcagctctctctcagagactcagctgcscctcctcctcttgccctgcgctctagaactccttgatcctgaggcctggcaggccccacagggccatctccagcctcggcaagggcggatcggacctaga

SEQ ID NO: 555710 - DNA, 201 bp, Homo sapiens
ggctctcctggtgaaaagtaaaaaaatgtgcaaatgatggccggatgaggtcagtgatgttctcagaggccctgggcctgccttgtgctgaggacagtagraaagaacgtaggaagtggcctctgcacattctgagggctgtagaaggcaggtggacaggagccaggactcagtacccagatcctctgggcaggcccgact

SEQ ID NO: 555711 - DNA, 201 bp, Homo sapiens
ttactatcatggagagctggaaggcctggtccaccccttgctcacttttgcagatgggactaggaccaggtagaagcttggcctcctgcaagccccaaccraagatagctacatggaccatggatcccacccaggtctctcccaagccagagcagaagatgtagatgggaagcacctgggcccccagccctggccccactc

SEQ ID NO: 555712 - DNA, 201 bp, Homo sapiens
acctgccccatcctgtgagcaggaagtcagccatgcaggtgttcggcctgcagaaggtagattagaaatggggaaactgaggcatggagcgaagtggtcaycccagggcccacagagaaaatgtggggcaagccagggccagagcccttcttcctcccttcccttctccacctcctccaactctggattcagcaggctgga

SEQ ID NO: 555713 - DNA, 201 bp, Homo sapiens
aactctctcttcaccactcacaggacctgggccttgagaggaccctccttcctgatatcctctacagagatgtggccttcctcaacccggtcgaccccatmtcccatgacctgcttgtgaacctggcccgggacctgcagtgccccaagaaggtgaggctggcaggcacgggccctgggctgggcactgtggtggacaggg

SEQ ID NO: 555714 - DNA, 201 bp, Homo sapiens
gaggctgaagcaggagaatcgcttgaatccgggaggcagaggttgccgtaagccgagattgtgccactgcactccagcctggacaaaaagagcgaaacttwgtctcaaaaaatacgaaagacacagtttgaatctggctttgccagactgtaggcctgggctgttcccgacaggtcactgtctgtggtcagtggggggact

SEQ ID NO: 555715 - DNA, 201 bp, Homo sapiens
cagatcacctgaggtcaggagttcgagaccagcctgacaaagatggagaaaccccgcctctactaaaaatacaaaattagccaggcgtggtggcacatgcctttaatcccagctacttgggaggctgaagcaggagaatcgcttgaatccgggaggcagaggttgccgtaagccgagattgtgccactgcactccagcctg

SEQ ID NO: 555716 - DNA, 201 bp, Homo sapiens
atctcccatgacctgcttgtgaacctggcccgggacctgcagtgccccaagaaggtgaggctggcaggcacgggccctgggctgggcactgtggtggacakgggggccaacagagcccagggctggggactgggaggctaggtccttctgcggcttgctgtgtggccttaggcaagtcactgtccctgtctgagacctgct

SEQ ID NO: 555717 - DNA, 201 bp, Homo sapiens
gccactgcccctcctcactgctgctccaaggtcccttctcaggttgacacctgcactctcaccaagaggctggtgctgaaatcccacctggtgaggccctyacctggtccgcatgagggccctaccctggaagtcagcctggcccgtggtagcagatgctccccaagccaagctgcaccctctgagtgacccgtttggcat

SEQ ID NO: 555718 - DNA, 201 bp, Homo sapiens
ctggaagtcctcggacaagatctgccgacagctcatctaccacctcacccctcactcgaagcagcagcaagggtccagcctgcgccagaggaagacccagmgctggtaagggtagcccagccactgcccctcctcactgctgctccaaggtcccttctcaggttgacacctgcactctcaccaagaggctggtgctgaaat

SEQ ID NO: 555719 - DNA, 201 bp, Homo sapiens
atcgcgcggcggccatgggggcgcggctgggccggcgggccgggcccgaggctggctctgaggccggggcggcggccggctgcgggcccgcgccctacgarcgccgggtgcggtggctccgcgagatccagtccacgctccgcgagcggcggccggagcgcgcccggcagctgctgcgcctcctgcgccaggcgagagaag

SEQ ID NO: 555720 - DNA, 201 bp, Homo sapiens
ggagtctcgctctgtcacccaggctggagtacagtggcacaatctcggctcactgcaagctccgcctcccgggttcatgccattctcctgcctcagcctcyccgagtagctgggactacaggcgcctgccaccacgcccggctaatttttgtgtgtttttagtagagacggggtttcaccgtggtctcgatctcctgacct

SEQ ID NO: 555721 - DNA, 201 bp, Homo sapiens
gctgggactacaggcacctgtcaccacgcccggctaattttttgtatttagagacggggtttcactgtgttagccaggatggtctcgatctcctgacctcrtgatccgcccacctcagcctcccaaagtgctgggattacaggcgtgagccaccacgcgtggccatgtcccctccttgctctccacagcctactcacgatc

SEQ ID NO: 555722 - DNA, 201 bp, Homo sapiens
tcctctcccagcagtcccgttgctttcgcccccctccccaaactccactgggcccgcccagaatggggtgtgggtgtctcccgcttgcaggcgcccgcacrcctaaatttcctctagaaagtcggtgggaaacagccccaccttgcggccggtgtagaccttgacgtagccgcccgcttcgtctcctttctgcaccacgat

SEQ ID NO: 555723 - DNA, 201 bp, Homo sapiens
ttgggaaggcagagaaaggcttggaggaaaggaagggagaggtgggattgagtagatggatacccatgtgtgtgttgggtggcggtgggggcgccgcgggsaagattagggaagggtcagctaggcaatacccaggacaccaatctataaaggactttaaaaacatcactggtgatgtaaagtgagggaggaaagtattta

SEQ ID NO: 555724 - DNA, 201 bp, Homo sapiens
agggtttcctgggataggaaacaccaacaaattgtctgtctcctggagggcaattcttattctcttacccttttgtggaagggcctcgtctatccaaagckggcctgccctttgctcctccaccctctgttccacagctgagcctctgatcctactccatctctggatggaggtgggtaacactcaccatcctggggtttg

SEQ ID NO: 555725 - DNA, 201 bp, Homo sapiens
tgtctcccgcttgcaggcgcccgcacgcctaaatttcctctagaaagtcggtgggaaacagccccaccttgcggccggtgtagaccttgacgtagccgccsgcttcgtctcctttctgcaccacgatctagaagattaaaggatcagaagtaggagaggaatcaaaggaaaaggtaggagaggacagcaggggagccgggg

SEQ ID NO: 555726 - DNA, 201 bp, Homo sapiens
tcttattctcttacccttttgtggaagggcctcgtctatccaaagctggcctgccctttgctcctccaccctctgttccacagctgagcctctgatcctaytccatctctggatggaggtgggtaacactcaccatcctggggtttgccttcctctggtctggccgactctggctcctcctccatcatggctgctacaggc

SEQ ID NO: 555727 - DNA, 201 bp, Homo sapiens
ccgcctcccgagtttacgccattctcctgcctcagcctcctgagtagctgggactacaggcacctgtcaccacgcccggctaattttttgtatttagagayggggtttcactgtgttagccaggatggtctcgatctcctgacctcgtgatccgcccacctcagcctcccaaagtgctgggattacaggcgtgagccacca

SEQ ID NO: 555728 - DNA, 201 bp, Homo sapiens
aagacattattgggaaggcagagaaaggcttggaggaaaggaagggagaggtgggattgagtagatggatacccatgtgtgtgttgggtggcggtgggggygccgcggggaagattagggaagggtcagctaggcaatacccaggacaccaatctataaaggactttaaaaacatcactggtgatgtaaagtgagggagga

SEQ ID NO: 555729 - DNA, 201 bp, Homo sapiens
tgtgcaagttgatggagagtgtgggtcagaagtgatgggaagcctaggagttaaagagtgagcttctgccagggccatgagtagtggtgtcagagctgggytggggagagaactgggttccttgcagggaggaaggattcttaccttgtcatcaggtgtcttcttctcagccttcttatccccttcagggtttcctgggat

SEQ ID NO: 555730 - DNA, 201 bp, Homo sapiens
aggggtagctggctggtgacatgtcccctctttttttttttttttttttgagacggagtctcgctctgtcacccaggctggagtgcagtggcacaatctcrgctcactgcaagctccgcctcccgagtttacgccattctcctgcctcagcctcctgagtagctgggactacaggcacctgtcaccacgcccggctaattt

SEQ ID NO: 555731 - DNA, 201 bp, Homo sapiens
cagtcccgttgctttcgcccccctccccaaactccactgggcccgcccagaatggggtgtgggtgtctcccgcttgcaggcgcccgcacgcctaaatttcytctagaaagtcggtgggaaacagccccaccttgcggccggtgtagaccttgacgtagccgcccgcttcgtctcctttctgcaccacgatctagaagatta

SEQ ID NO: 555732 - DNA, 201 bp, Homo sapiens
cccaaaagactcacagacaaggagagaaatgaagaagctgagtagattatagatcagggcagctggggtgagcagtcgtggaaatcaagaggatgaagagktaacttacgttcgggattccctaagtcagtccacaggctgtagagggagctgggagcctcgaggccttgatggtggtgctggggaaaaactggtcctctt

SEQ ID NO: 555733 - DNA, 201 bp, Homo sapiens
caggggagccggggtttacaggggctcaccctagtcttattaatggttaagctctccaaggagtgtggtgggctagggagcattcaggcctgggattgggwtggggcaacagcctacctggtccttcttgagagtgatctgccctatctcgcggttccccacgaaggatctcgtcacgcggtgcacacgttctccagcccg

SEQ ID NO: 555734 - DNA, 201 bp, Homo sapiens
ctgtagtaaggatgaggacaatctagaatccttgttcttgcttagaaatgattttgcacacaaagagcacagattctgaagctagcaactgaagattccaktcttggctctacctcttgctaactgtatgtagttgcaactaaatcgtatctccctctgctgtaaaatggggatattgcctctgcatccaaatggatataa

SEQ ID NO: 555735 - DNA, 201 bp, Homo sapiens
actttaaaaacatcactggtgatgtaaagtgagggaggaaagtatttattagaactccttccaggcagagcattatatgatgtttgaaacacaactttgcytgcttgggagctgagacatgcgcagaatcactattctccttctaaggagaatgggcccttaactgctggcttttgttctgctaaatggcatgtgtaagct

SEQ ID NO: 555736 - DNA, 201 bp, Homo sapiens
cccctctttttttttttttttttttgagacggagtctcgctctgtcacccaggctggagtgcagtggcacaatctcggctcactgcaagctccgcctccckagtttacgccattctcctgcctcagcctcctgagtagctgggactacaggcacctgtcaccacgcccggctaattttttgtatttagagacggggtttca

SEQ ID NO: 555737 - DNA, 201 bp, Homo sapiens
cacacataggcaaagcagcaagatcccctcctgccttacaaagtgaaaaggtttcctcttagtcctggattcatcttgacaagccacagtattagcaggaaaaaaaaaagatgctgattatcagttataaacagtgagtgagagccaagatcccacaatgaccttttgtccccttgtcactccagtggtcataagtgaatg

SEQ ID NO: 555738 - DNA, 201 bp, Homo sapiens
tactaaaaaatacaaaaaaatagccaggtgtggtggtgggcacctgtagtcccagctagtcgggaggctgaggcaggagaatggcgtgaacccgggaggcrgagcttgcagtgagcccagatagcgctactacactccagcctgggcgacagagtgagactccgtctcaaaaaaaaaaaaaaaaaagtatccagaaagagg

SEQ ID NO: 555739 - DNA, 201 bp, Homo sapiens
tgttacaatgacgatgatgatgattcttggcggttacacaatccttcctcctgggggggaggcagctaggaggcccagcaggggggcttctatgctgctgrgctcccctagggagttggggtagtctgtgccaactccaggcagctgctgtggcctcacccctgggccccccaattttgggtcatccatcctcaaatacac

SEQ ID NO: 555740 - DNA, 201 bp, Homo sapiens
tttgagaccagcctgggaaatatggtgagacgctgtctctaaaaaaattttttaaagatttaaaaaataggccaggcgcggtggctcatgcctgtaatccyagtactttgggaggccgagtcaggtggatcacgaggtcaggagatcgagacaatcctggctaacacggtgaaaccccatctctactaaaagtacaaaaaa

SEQ ID NO: 555741 - DNA, 201 bp, Homo sapiens
ttcgagcctgcgagcaggaggcattctgattatctgttcatttctagaaacgcttgagccagagggactgtttgttgcctagagaacaaagctaaaacatyggaatgaaattgagagagaaataaaatttcctattctaagcatagcctatgagtaagcatctctgtggctttttggaaagtgtgtgtcagaaaatgcata

SEQ ID NO: 555742 - DNA, 201 bp, Homo sapiens
aggctgaggcaggagaatcgcttgaacctgggaggcggaggttgcagtgagccgagatcatgccattgcactgtagcctgggggacaagagcaagacttcrtctcaaaaaaaaaaaaaattagacggacatggtggtggggacctgtaatcccagctactcggaaggctgaggcaggagaatcgcttgagcctaggaggca

SEQ ID NO: 555743 - DNA, 201 bp, Homo sapiens
gtggtggggacctgtaatcccagctactcggaaggctgaggcaggagaatcgcttgagcctaggaggcagagattgctgtgagccaagattacgccactgyactccagcttgtgtgacagaatgagactccatctcaaaaaataaacaaaaataaaaaagaacaggggctctggagtttgacttgtgctcgaatcctggct

SEQ ID NO: 555744 - DNA, 201 bp, Homo sapiens
tttaagggctttatgtatgccgtcttttaaaatgtttacaacaacccgtgattaggttttattattacccaactctccaggtgaggaaactcaggcttacrgaggttaagtgcctctcatgagcccaggtcacagctactcaggggtggacacaggtcacaaacccaggtggtctgactccaactcttgactgtcatgttt

SEQ ID NO: 555745 - DNA, 201 bp, Homo sapiens
aggtctgctttgggaaagggccattatcatcttcattttaatctataaactataaactaagtttctccgaatgttagttcagcctatgcccaggaatgaayaaagacaacttggagattagaagcaagatggagtcaattaagttagatctcttccactgtatcagtcacaattttgcaaaggcggcttcagatttacatt

SEQ ID NO: 555746 - DNA, 201 bp, Homo sapiens
ttgactttggaaagaaagtgattcctcacttttggagtgagaaagttaaaggttcatgtaatcaaaaagaggcctagaatccctgttctaagccaggctgktaggctatgggaccacttctttctcccctactataggactgcattcaaacctcaacatgaccttcttcctaggttgtctgagtaaaaggctgctctactc

SEQ ID NO: 555747 - DNA, 201 bp, Homo sapiens
tctcaattaaaaaaaaaaaaagtggagaactggcagtgacctctactgggggccatggcagggaggggagccttctggaagggctgccttggagattggartggggactcccagggagacctgcgttccatccctgcctgcctcacccctgccacagactctgcacaccactggatggtgggtccaagcctggcacagtcc

SEQ ID NO: 555748 - DNA, 201 bp, Homo sapiens
gagtccatgggtcttgaggacaccccagtatttgtcagtttccttctccacgttcttttcggcctgtttctgtagcctcattagctgttttgtttttttgttttttttttttgagacggagtcgcactctgtcgcccaggctggagtgcagtggcgcgatctcggctcactgcaagctccgccccacgggttcacgccatt

SEQ ID NO: 555749 - DNA, 201 bp, Homo sapiens
ttggatttaacatcccaggataggaaagcagggctgtgtgcttcaaggtcaagagctacctgcccctgggatttgtaattagatcgccatctcaacagagrtcattccgagaaatcctcagggccaacagcatgtccctgtttatctgacagggcattataaacttcacagaaacttctcaaaccaaatttaattgacttt

SEQ ID NO: 555750 - DNA, 201 bp, Homo sapiens
atccatcctcaaatacactatttttgcttgtatgcctgtgtcatttgttggttgtacagaggggatatagggagagtggtaggcttcccacacagaaactrggacatcctcccttacccatcgcagtctgtctggccccccaccccgagcccagtgccattccctcaaatccctccactggctgggctaccattgcccatc

SEQ ID NO: 555751 - DNA, 201 bp, Homo sapiens
gttcacgccattctcctgcctcagcctcccaagtagctgagactacgggcgcccgccaccacgcccggctatttttattttttatttttttagtagagacygggtttcaccatgttagccaggatggtctcaatctcctgacctcctgatctgcccgcctccgcctcccaaagtgctaggattacaggcgtgagccaccgc

SEQ ID NO: 555752 - DNA, 201 bp, Homo sapiens
gcctgtagtcccagctacttgggaggctgagatgggaggctgcagtgggctgtgattacaccactgcactccactctgggtaacagagtgagatcctaccwaaaaaaaaaaaaaaaaagaaaaagaaaaaaagaagccactagcctggcattgcatagctcagtcaacaaaatatcctttttttttttcttccaggaaaag

SEQ ID NO: 555753 - DNA, 201 bp, Homo sapiens
ccgcctcagcctcccgggtagctgtgattacaggcgcccgccaccacatccagctaattttttgtatttttagagacggggtttcaacatgttggccaggstggtctcgaactcctgacctcaggtgatccaccagcctcaacctcccaaagtgcagggattacaggctaaataagaattttagaactaagaaaatataag

SEQ ID NO: 555754 - DNA, 201 bp, Homo sapiens
ggccccttgagtgtcctcaacacatagtagttggtgtccaccaaagtgagtgattcaagagaacaagaaaccacaaagtccttttaaatctgatctcaaargtcacactctgtcatttctccagtatcttattggttacaagtctatttagtgtgagcccttcccacattgactacacaaaggcaggattaccaggaagat

SEQ ID NO: 555755 - DNA, 201 bp, Homo sapiens
acgcctgtagtcccagctacttgggaggctgagatgggaggctgcagtgggctgtgattacaccactgcactccactctgggtaacagagtgagatcctayctaaaaaaaaaaaaaaaaagaaaaagaaaaaaagaagccactagcctggcattgcatagctcagtcaacaaaatatcctttttttttttcttccaggaaa

SEQ ID NO: 555756 - DNA, 201 bp, Homo sapiens
caaggcttttgccatgttggccaggctggtctcgaacacttgacctcaagtgatctggccacctcggcctcccaaagtgttgggattacaggcatgagccrccacgcccggcctcaattgtatttctatatactaataatgagcaattggaaaaaaaatctacaatagccacccccccgccaagtgaaatatagtttgaga

SEQ ID NO: 555757 - DNA, 201 bp, Homo sapiens
gggttgctgttcatccacttgtggaggaaggccaggtacttcaacttctttctatagacattgccagaaatactgatgcccccgcagtgtacgaccaccamcttccggcctgcttagccaccatggccctcaggaagcccaggagatagctttgaccattgagcaccgggacctgcccctctgccatcttcggcagccgcc

SEQ ID NO: 555758 - DNA, 201 bp, Homo sapiens
gcagggtctggcccagggttgtagggacagtttgccacaagaagccagcagccaggtatggtggctcacacctgtaatcctagcactttgggaggctgagraaggtggatggctagagcccaggagttccagacccatctggacaacatagcaaaaccctgtctctacggaaaaaaaaaaaaaaaagccaagtatggtggt

SEQ ID NO: 555759 - DNA, 201 bp, Homo sapiens
cctctttcttctgggcaccatctgcctcaacctatcccctggccagtgtcactcacagggcagaaaatttatcttcaccatctcacaattagtttaatctkaaaaaaaatggattataaagttaaaagctacagcaactcttttttgtgctcataaaaggcatcatctgtttttttctgtatcaacaaaagtagaatgttc

SEQ ID NO: 555760 - DNA, 201 bp, Homo sapiens
actttgggaggctgaggaaggtggatggctagagcccaggagttccagacccatctggacaacatagcaaaaccctgtctctacggaaaaaaaaaaaaaawagccaagtatggtggtgcacgcctgtagtcccagctacttgggaggctgagatgggaggctgcagtgggctgtgattacaccactgcactccactctggg

SEQ ID NO: 555761 - DNA, 201 bp, Homo sapiens
gagaggccgctgactgagggctgccggaactgaactgggaaggcacacgagggtgctgtcatcaaggcggtgggtcagtggtcagcagtcagcgaagcacsaaggctgcgtctttctgctaggctgtgtccatggaaaactgcagagagggagaggatgtttagagggcaggtgcccagagggccaattccaggggatccc

SEQ ID NO: 555762 - DNA, 201 bp, Homo sapiens
tgctgcctgcagcagagctgtgaaacacaccccagggagaggcagaccccttcccttcacctgctcgataggctcagtcgccgctaagtaattggggtagrggttcagccgcagatctgcttcccgcgccgcagaccgtgcagtcgtcggtgctcctcaggtgcggcctgggtgcccagagcattcattagactctcggac

SEQ ID NO: 555763 - DNA, 201 bp, Homo sapiens
cattttttttttttttttttttttacacacagggtaactttttggaagagtactttgtaacaataaagtgctgtgcacagaaaggagaaatgccattatgrggatgtgtgtgccgacctgggaccagcagggtgaaagagtctatcattcatgatgagagctgccatttgcgctaagcacacaccatgtgccaggcactat

SEQ ID NO: 555764 - DNA, 201 bp, Homo sapiens
aactagtgccaagcgctgtgtccccacaagtaggtgcttgataaatatttgttgaatgaagaaatgactcccaacagctatgactctgccttctgagaggytttctggaaagaatgagttctctggcagcgtgtctccagaattccagggaggggctgggtggggatgggggtggttctgaggctactaaagagaaagacc

SEQ ID NO: 555765 - DNA, 201 bp, Homo sapiens
gagcatgaatctgcattttcagcatgcttctcaggtggtctaatgtgcactgccctataggacaaatggcaagtccccaagtctggcacttgaggcctccyttgaggggtcccacagctctagttgggcagatgacttgtgtccctcagctgtgccttggcctgattctccatttaagctcacagagcccttttcttgctg

SEQ ID NO: 555766 - DNA, 201 bp, Homo sapiens
cgaggcaagtggatcacctgaggtcaggagttcgagaccagcctggccaacatggggaaaccctgtctctactgaaaatacaaaaattagctgagcgtgatggtgggcgcctgtaatcccagctactcaggaggctgaggtgagagaatcgcttgaacctgggaggcggaggttgcagtgagctgagatcacgctattgca

SEQ ID NO: 555767 - DNA, 201 bp, Homo sapiens
gcggtggctcacacctgtaatcccagtactttgggaggccaaggcgggcggatcacctgatgtcaggggttcgagaccagcctggccaacatgctgaaacmccgtctctattaaaaatacaaaaaaattagccaggcctgctggcgtgcacctgaggcaggagaatcgctggaacccaggaggcagaggttgcagtgagcc

SEQ ID NO: 555768 - DNA, 201 bp, Homo sapiens
aggccgaggtgggtggatcacctgaggtcaggagtttgagaccagcctggccaacacggtgaaaccctgtctctactaaaaacacacacacacacacacacacaaaaaaattagccgggcgtgggggcgggcacctgtaatcccagctacttgggaggctgaggcaggagaattgcttgaacccaggaggcggaggttgca

SEQ ID NO: 555769 - DNA, 201 bp, Homo sapiens
gccgaggtgggtggatcacctgaggtcaggagtttgagaccagcctggccaacacggtgaaaccctgtctctactaaaaacacacacacacacacacacacaaaaaaattagccgggcgtgggggcgggcacctgtaatcccagctacttgggaggctgaggcaggagaattgcttgaacccaggaggcggaggttgcagt

SEQ ID NO: 555770 - DNA, 201 bp, Homo sapiens
gaggcaagtggatcacctgaggtcaggagttcgagaccagcctggccaacatggggaaaccctgtctctactgaaaatacaaaaattagctgagcgtgatggtgggcgcctgtaatcccagctactcaggaggctgaggtgagagaatcgcttgaacctgggaggcggaggttgcagtgagctgagatcacgctattgcac

SEQ ID NO: 555771 - DNA, 201 bp, Homo sapiens
aaaatccaatcgcttgaggccaggagttggaggctgcagtgcactatgatcatgccactgcactccagcctgggtgacagagcaagaccctatctctttcraaaaaaaaaagggctgatgagggtcttgacaagggactgtgctcaggaggcttgcaggggtataggggagcagggctcccatgtagggaacctaagacag

SEQ ID NO: 555772 - DNA, 201 bp, Homo sapiens
tgaggcaggagaattgcttgaacccaggaggcggaggttgcagtaagccgagatcacaccattgcactttagcctgggtgacagagcaagactctgtctcaaaaaaaaaaaaattctggccgggtgtagtgggtcgcgcctataatcccagcactttgggaagcaaagacaggtagatcacttgagcccaggaatttgaga

SEQ ID NO: 555773 - DNA, 201 bp, Homo sapiens
aggcaagtggatcacctgaggtcaggagttcgagaccagcctggccaacatggggaaaccctgtctctactgaaaatacaaaaattagctgagcgtgatggtgggcgcctgtaatcccagctactcaggaggctgaggtgagagaatcgcttgaacctgggaggcggaggttgcagtgagctgagatcacgctattgcact

SEQ ID NO: 555774 - DNA, 201 bp, Homo sapiens
caatggtgcaagctcggctcactgcaacctccgcctcctgggttcaagcaattctcctgcctcagcctcccaagtaactgggattacaggcacccagctgttaaaagaaaaagcatttggcttctactggaatctggagccacagtttggtgtcaaacagagcagctgtgcttttgtttcaaatgctgtttgctgaaaacc

SEQ ID NO: 555775 - DNA, 201 bp, Homo sapiens
aatcatcacagggtcctgaggcgacatacagcctcctcagcttacgaagatgatgggattaagagattaaagataggcataggaaatcacaagggtattgrttggagaagtgataagtgtccatgaaatcttcacaatttatgttcagagattgcagtaaagacaggcgtaagaaattacaaaagtattaatttgggaaac

SEQ ID NO: 555776 - DNA, 201 bp, Homo sapiens
caggacctctagattgcacctagattaaacaagacggaagctctcaaaaggctctaagtctaggcctcctgtgaggtagggtctgaaaggacttaaaccattttttttttttttttttttttacacacagggtaactttttggaagagtactttgtaacaataaagtgctgtgcacagaaaggagaaatgccattatgggg

SEQ ID NO: 555777 - DNA, 201 bp, Homo sapiens
ctcctcagcttacgaagatgatgggattaagagattaaagataggcataggaaatcacaagggtattggttggagaagtgataagtgtccatgaaatcttcacaatttatgttcagagattgcagtaaagacaggcgtaagaaattacaaaagtattaatttgggaaactaataaatgtccatgaaatcttcacaatccac

SEQ ID NO: 555778 - DNA, 201 bp, Homo sapiens
ctactcaggaggctgagacgggagaattgcttgaacccgggaggcggaggctgcagtgagccaagatcgtgccactgcactccagcctgggagacagcgtkagactccatctcaaaaaaaaaaaaaaaaaaaaaaaaagcaatctctatcaggcactgtattaggtgttggagatactgaaatgtacaagacaggcatggc

SEQ ID NO: 555779 - DNA, 201 bp, Homo sapiens
cttctgacctatagaaattgtgagaaaatatatggatgttgttttaagccactaagtttgtggtaatttgttacagcaccaagagtaaactaatacattayccaaaatgagcagcagagagaaaaaaattttttttttgaaacacagtctcactttgtcactcaggctggagagcagaggcacgatcttggctcactgcag

SEQ ID NO: 555780 - DNA, 201 bp, Homo sapiens
catcctagcagccgcgaccttggctctgccctgtctgagctggaaacacagcttagcttctagacatcgctggcacaggcctggcacaagtaagcagtgtyctcacctgtctgaaacgggacacggggtcggaggaaccaggatctagcctggccccaagcggaactctctggtggcccagaggtcgtcactggggagccc

SEQ ID NO: 555781 - DNA, 201 bp, Homo sapiens
tcctcagcttacgaagatgatgggattaagagattaaagataggcataggaaatcacaagggtattggttggagaagtgataagtgtccatgaaatcttcacaatttatgttcagagattgcagtaaagacaggcgtaagaaattacaaaagtattaatttgggaaactaataaatgtccatgaaatcttcacaatccacg

SEQ ID NO: 555782 - DNA, 201 bp, Homo sapiens
tccacgtaaagagttttctcagggcttggcatagagtaagccctctcaaaatgataactatttttctcgcttctgatagggaagttaaaatgcagggctcygtgaaagggaagtgtaaaaaagatttcttccaggtcggagcctagggagtcgcaaagaccacctgaagaaatcacaaaagatctaaagaacgtttagctt

SEQ ID NO: 555783 - DNA, 201 bp, Homo sapiens
acagcaccaagagtaaactaatacattatccaaaatgagcagcagagagaaaaaaattttttttttgaaacacagtctcactttgtcactcaggctggagwgcagaggcacgatcttggctcactgcagccttgacctccctcctgggctcaagtgatctctcacttcagccccaacaaatagctgggactacaggtgcat

SEQ ID NO: 555784 - DNA, 201 bp, Homo sapiens
gcatgttccaatagaaggagaggtggcaatgaggcaggacaaacaggctgacattttggggtccccaggtagaagccagtcaccgcctctgacagcgaatsgctgccctttccctgggctgcagggaggggaggtggaggattgggtgggatgtacaataggtgtgaggagatgggtgggaagtttaggaccttcctgcct

SEQ ID NO: 555785 - DNA, 201 bp, Homo sapiens
ctgaggcaggagaatcacttgaacccaggaggcagaggttgcagtgagccgagatcacgccactgcactccagcctagggacagagctagactccatctcaaaaaaaaaaaaaaaaagaagaaagaaagaaagaagttcatgatttgcacagaggtcacggggtccctaatgatgtgaagcatggtctatgtgactccaga

SEQ ID NO: 555786 - DNA, 201 bp, Homo sapiens
aggtgggggtccgggtgggtgcatggcctggatggccctgtgaggggtatggctgttgtcccattttacaaatgaggaaactgaggttcatggctgtggargaagcagaactgaggctcagagagggccaacagttcagtgagttccaggccccagactcaggctctggaggcccaactcgtgtttatttgtttatttact

SEQ ID NO: 555787 - DNA, 201 bp, Homo sapiens
agggcaggtgcccagagggccaattccaggggatccctgggaaatggatggataggcttatagcattccccaaggcagtcctctgaccatcacagcagaaytacccagcaaactcatttaaagtacagatacccaggtccctctccaaacccacagtcagactctcggggtgaagagcatgaatctgcattttcagcatgc

SEQ ID NO: 555788 - DNA, 201 bp, Homo sapiens
caactaaaagccctggaaataatggatctgaggactctgaaaaagaaatattaacaaggctgggtgcggttgctcatgcctataatcccagaactttgggrggctgaggcaggaggatcacttgaggccaggagtttgagaccagcctgggcaacacaatgagactctgtctctagaaaaaaaaaaattttttttttttgg

SEQ ID NO: 555789 - DNA, 201 bp, Homo sapiens
tggaacaaagtccaagagttaacgagagcgaagcatcacttctaggggtgggccgggtaggtttcctaggggagctggcattggaataggcttcttcgccygcttagtgtcaggacccccagggttttacctctctccttcaggcgggtgggcgggttcgctcaggaagtagccgcttggggaagccttaggcaaggttct

SEQ ID NO: 555790 - DNA, 201 bp, Homo sapiens
agccaagaggtggaagagtcaggatgagaatccacacctcttaacattcctcccaagctccttcttaggtgatattgggtcacgatccagaggtggaaagwaatggattcttaggacttttttttttcttattttcattcatttattgaggcaccactgcactgcatcctgggcaaaagggtctcactctgttgctgagga

SEQ ID NO: 555791 - DNA, 201 bp, Homo sapiens
ccccagggttttacctctctccttcaggcgggtgggcgggttcgctcaggaagtagccgcttggggaagccttaggcaaggttcttcgggagagagacccrtcatgatcccgcagcctcaatccccgctggcctaacgctttggtttccatagcaatgggctcgtcgcagaaaggaatagcctgtgccgggtcttcagaga

SEQ ID NO: 555792 - DNA, 201 bp, Homo sapiens
tgatgggactaagacccagagaagttcatgatttgacaggctgggcatggtatctcatgcctgtaatcccagcactttgggaggctgaggtgggaggactcttgagaccaggagttcgagaccaccctggccaacatggtgaaaccctgtatctattaaaaatacaaaaattggggccgggcgcggtgtctcatgcctgta

SEQ ID NO: 555793 - DNA, 201 bp, Homo sapiens
cattgcaacctctgcctcctggtttcaagcaattcttgtgcctcagcctcctgagtagctgggactacaggctcatgccaccgtcctggctaatttttaattttttttttttttttttttttttagaaacaggctcactatgttgcccaggctggtctcaaacccctggcctcaagtgatcttccctccgggcctcccaaa

SEQ ID NO: 555794 - DNA, 201 bp, Homo sapiens
gaaggaggttgcagtgagctgagattacaccactgcactccagcctgggcgacagaatgagactctgtctcaagaaaaagaaagaagttcagcccagcgcrgtggctcacacctgtaatcccagcactttgggaggctgaggtgtattgggggaaattcagccagatatcgggcgaaattcacccctgatatttcacgtag

SEQ ID NO: 555795 - DNA, 201 bp, Homo sapiens
tgaggcaggagaatggcgtgaacccgggaggcagagcttgcagtgagcccagatagcgctactacactccagcctgggcgacagagtgagactccgtctcaaaaaaaaaaaaaaaaaagtatccagaaagaggagagcccaggcagctgttggcagggccagcgacttccctccttcttgggccagttgtaggcccaggga

SEQ ID NO: 555796 - DNA, 201 bp, Homo sapiens
tcacacataggcaaagcagcaagatcccctcctgccttacaaagtgaaaaggtttcctcttagtcctggattcatcttgacaagccacagtattagcaggaaaaaaaaaagatgctgattatcagttataaacagtgagtgagagccaagatcccacaatgaccttttgtccccttgtcactccagtggtcataagtgaat

SEQ ID NO: 555797 - DNA, 201 bp, Homo sapiens
acgagacactgaagcccagtgaggtcataaagcaagtcaggtgcaggctagactctcagcctaggctagactctcagcctagggatccttcccccctcccygccccagtcattgggaccatgttgcccactccccaagaggctcagggggaacagagctagggacctcttccttcaaactcacctcctttaggcggttcag

SEQ ID NO: 555798 - DNA, 201 bp, Homo sapiens
gcgctgattggtgcatttataatcctctggctagacagaaaatttctccaagtccccactccacccaggaagtccagctggcttcacctctcaatctcatrcataagcagatagctctttctgccatgtgctgccataatggtgtgcatgaatgtcccggctgatgctctcaagagcatcaacaatgccaaaagagaggca

SEQ ID NO: 555799 - DNA, 201 bp, Homo sapiens
gagcactgattggtgcatttttacagagtgctgattggtgcatttacaattcttcagctagacacagagcgctgattggtgcatttataatcctctggctrgacagaaaatttctccaagtccccactccacccaggaagtccagctggcttcacctctcaatctcatacataagcagatagctctttctgccatgtgctg

SEQ ID NO: 555800 - DNA, 201 bp, Homo sapiens
ccttatttgtccccgcccacatcctgctgattggtccattttacagagtgctgattggtccattttacagagtgctgattggtgcatttacaatcctctakctagacacagagcactgattggtgcatttttacagagtgctgattggtgcatttacaattcttcagctagacacagagcgctgattggtgcatttataat

SEQ ID NO: 555801 - DNA, 201 bp, Homo sapiens
gggaagagcgaaaggacaaagcttccacagcaccgaagggcacccaagcaggttgccggctgctggctggggatgaagggtggcagtggcggccagctttyagtcccttatttgtccccgcccacatcctgctgattggtccattttacagagtgctgattggtccattttacagagtgctgattggtgcatttacaatcc

SEQ ID NO: 555802 - DNA, 201 bp, Homo sapiens
gtccagctggcttcacctctcaatctcatacataagcagatagctctttctgccatgtgctgccataatggtgtgcatgaatgtcccggctgatgctctcragagcatcaacaatgccaaaagagaggcaaacaccaggttcttataatgtcgtcgtctggtttctaactgtggtgatgaagcatagttacactggtgaag

SEQ ID NO: 555803 - DNA, 201 bp, Homo sapiens
aaaaattacccaggtgtggtggtgcatgcctgtaatcctagctactcgggaggctgacgcaggagaatcacttgaacctgggaggcggaggttgcagtgasccgagatcgcgccactgcactccagccaggcgacagaatgagactctgactcaaaaaaaaaaaaaaaaaaaagtacctactaggacagtgttagctttca

SEQ ID NO: 555804 - DNA, 201 bp, Homo sapiens
aggctggagtgcagtggctcaatcacagcctgaacctcccaggctcaagcaatcctcccacctcagcctcctgagtagctgggactacaggcatgcaccaycacgcccagctgattttttttttttttttttgagacggagtttcactctcattgtccaggctggacactctcatgtccagtggcatgatccggactcact

SEQ ID NO: 555805 - DNA, 201 bp, Homo sapiens
aaacttagccaggcatgattctcatgtctgtaatcccagctactcgggaggctgaagcaggaaaattgcttgaacccggaggcggaggttgcagtgaaccragatggcgccactgcactccagcctggggaacaagagcaaaattctgtctcaaaaaaaaaaaaaaaaatttagctgggcacatagtggcgggcacctgta

SEQ ID NO: 555806 - DNA, 201 bp, Homo sapiens
tgaactcctgggctcaagcaatcctcctgccttggcctcccaaagtgctgggattacaggcgtgcaccaccggcacccaaccattctacacccttttgtcrgacagagctgacaaaaagctcagaggcgggctgtgatggtcaaagtcacatagcaagacagggactccgaacgggaatttcctggttgggggaggatggg

SEQ ID NO: 555807 - DNA, 201 bp, Homo sapiens
tgcatctattgagatgatcatgtggtttttctcctttattttattaaatgtggtaaaatatgtgaactgattttcatatgttaaaccttgcattcctgtartaaaccaatttggttgtagaaaaaaagagataggaaaaccgaaccctagggaatccctgtttgcgctgtttgtttattcagtagattacggggtcttgct

SEQ ID NO: 555808 - DNA, 201 bp, Homo sapiens
ataaaatgggataggtcaggagtccttcacgtttattccagtcacatccccaaagccatacttccttatccctgagttgggtcgggctgtgagttatcccyggatcagcagttcccaaggtctgaaggaaatgctggacccttgtgggcagaagggggaactgtgtatacaggtggggagactcaggcctagagacaccag

SEQ ID NO: 555809 - DNA, 201 bp, Homo sapiens; identical to SEQ ID NO: 404311

SEQ ID NO: 555810 - DNA, 201 bp, Homo sapiens
ggaacagagctagggacctcttccttcaaactcacctcctttaggcggttcagctgtcatcccccgcaggtctggagggggataaaatgggataggtcagragtccttcacgtttattccagtcacatccccaaagccatacttccttatccctgagttgggtcgggctgtgagttatccccggatcagcagttcccaagg

SEQ ID NO: 555811 - DNA, 201 bp, Homo sapiens
cacatccccaaagccatacttccttatccctgagttgggtcgggctgtgagttatccccggatcagcagttcccaaggtctgaaggaaatgctggaccctygtgggcagaagggggaactgtgtatacaggtggggagactcaggcctagagacaccaggggaaaagagcaaggccagagacccacagtgtgcctgccagc

SEQ ID NO: 555812 - DNA, 201 bp, Homo sapiens
ggtggagggggtgcggcttctgggagccactgagacctaccagcgtgtcttcttaccatccacagctactgctgagcagactttctgacctggggtgaggmaaggaatttgctattcaaaggtgggaagatgcaaggagggttacagctgataggccacaacagggtcttaaatcagctgggttaaatttatggagtcagg

SEQ ID NO: 555813 - DNA, 201 bp, Homo sapiens
gtgttagccaggatgttcttgatctcctgatctcatgatccgcccgtctcagcctcccaaagtgctgggataacaggtgtgagccactgcgcctggcccatttttttttgtttttttgtttgtttgtttttttgagacagagtcttgctctgtcagccaggctggagtgcagtggcacgatctcagctcactgcaacctcc

SEQ ID NO: 555814 - DNA, 201 bp, Homo sapiens
aagtcactcctcctcctccagcccatttcctgagtggcagaatggggagtgaggatgacatctgcctcagagggtgagaatgaagtgctggggacataacmtgtgaagcttgttaccaacaagaaaccctggagtgaagccttgggagaagaaatgctcttttgtgccctgtatacttcctcctcagggaagccctcccag

SEQ ID NO: 555815 - DNA, 201 bp, Homo sapiens
ctgacgcaggagaatcacttgaacctgggaggcggaggttgcagtgagccgagatcgcgccactgcactccagccaggcgacagaatgagactctgactcaaaaaaaaaaaaaaaaaaaagtacctactaggacagtgttagctttcattatcagttccttccttacctcataaagaccccgtgaactccattttgcaggt

SEQ ID NO: 555816 - DNA, 201 bp, Homo sapiens
aaccagagcatcagagaccatgacctcagtctactcgaggtacagacgagacactgaagcccagtgaggtcataaagcaagtcaggtgcaggctagactcycagcctaggctagactctcagcctagggatccttcccccctccccgccccagtcattgggaccatgttgcccactccccaagaggctcagggggaacaga

SEQ ID NO: 555817 - DNA, 201 bp, Homo sapiens
aaggtggtgaggacccaaagagtgagcagcagcaagatttattgggaagagcgaaaggacaaagcttccacagcaccgaagggcacccaagcaggttgccrgctgctggctggggatgaagggtggcagtggcggccagcttttagtcccttatttgtccccgcccacatcctgctgattggtccattttacagagtgctg

SEQ ID NO: 555818 - DNA, 201 bp, Homo sapiens
tggatcacaaagaagcaagacgaaaacacacaggaggtaaaatcctggaattctttttctaaggaggtaatatgcatttgcagataaaatgcctacaattaaaaaaaaaaaaaaaaggagaacggatcaccagatcaccagattaggatgccagttctcttcttcatgctttcttccacagacacagcaagttcgtcactg

SEQ ID NO: 555819 - DNA, 201 bp, Homo sapiens
accatgttaggctggtctcaacctcaagtgatccgcccgcctccgcctcccaaaatgctggggttacaggcatgagccactgtgcctggcctcttttttctttttttttttagagacagggtctttctgtgttgtcccagctagtgttcaactcctggcctcaaacaatgctcctgccttagcctcctgagtagctgggat

SEQ ID NO: 555820 - DNA, 201 bp, Homo sapiens
tgaaacccccccgtctctactaaaaatacgaaaaattagccaggcgtggtggcgggcacctgtagtcccagctactcgggaggctgaggcaggagaatggsgtgaacccgggaggcggagcttgcagtgagccgagatcacgccactgcactccatccagcatgggtgacagagcgagactccgtctcaaaaaaaaaaaaa

SEQ ID NO: 555821 - DNA, 201 bp, Homo sapiens
gatggggtcaggctcagacagggtctaggtcagcccttagttgagtagtctgtagcctagggctagatacagggctcagtccatgattgggcttagtcttyagtctgtgaccaggagccaggctcagtctgtgaccagggtcatgtctctgtcaatgactaagttcagggctcagtctgtgaccagattcagggcacagtc

SEQ ID NO: 555822 - DNA, 201 bp, Homo sapiens
gcaggagaatggcgtgaacccgggaggcggagcttgcagtgagccgagatcacgccactgcactccatccagcatgggtgacagagcgagactccgtctcaaaaaaaaaaaaaaacactttcatggaccccctaaaagtatagtgggccctaaacactgagcctactgtgccttctagagaagttaagtctgcactgagtc

SEQ ID NO: 555823 - DNA, 201 bp, Homo sapiens; identical to SEQ ID NO: 404317

SEQ ID NO: 555824 - DNA, 201 bp, Homo sapiens
cgggaggcagaggctgcagtgagccaagattgtgccactgcactccagcctgggtgatagagcaagactccgtctcaaaaaaaaaaaaaaaaaaaaatatwtatatataatatgagtatgtagtcaatatgattagtcttgtccagactattcacacagtaagctatctctaacactctgttcactgctggggaagtatga

SEQ ID NO: 555825 - DNA, 201 bp, Homo sapiens
aacctaagcatgtcacagcaggggatgagttaaattaatgagtgtacctccataggatggaaaaccatgcaattgttaaaaatgatgcagcaggctgggcrtgggtggctcacgcctgtaatcccggcactttgggaggccgaggtgggcggatcacctgaggtcaggagtttgagagcagcctggccaatatggtgaagc

SEQ ID NO: 555826 - DNA, 201 bp, Homo sapiens
tatgtggcagcatgtaatttaggccagcagtcttcctcaagtggggccaaggttggggattagtctgtgatggggtcaggctcagacagggtctaggtcascccttagttgagtagtctgtagcctagggctagatacagggctcagtccatgattgggcttagtctttagtctgtgaccaggagccaggctcagtctgtg

SEQ ID NO: 555827 - DNA, 201 bp, Homo sapiens
ggtgtgtccagagtttgttccttcaaatgtgtctggagtttcttccttccagtgggttagtggtctcactgacttcaagaatgaagccacggactttcacrgtgagtgatacaactctcttttttctatttttcttttctttctttctttcttttttttttttttgagacggagtctcgctctgtcgcccccaggttgaag

SEQ ID NO: 555828 - DNA, 201 bp, Homo sapiens
tgggatgcgctgaggcggaggaggggcggggtcagcaggctgggcctcgcctctggcctcgcccccagcccacctcccacggcctcacctctagttcctcstagcggcggcccagcagcacgagctcagggtcggccccagggaggtgtttcatcaccaggttgtgactggaggtggtgttaaggagcggggtggtgggca

SEQ ID NO: 555829 - DNA, 201 bp, Homo sapiens; identical to SEQ ID NO: 404327

SEQ ID NO: 555830 - DNA, 201 bp, Homo sapiens
cgaagtttcctctgggggcttcgcgggcgcccacacgtactcggggggcacctgcgcgtcgggcgccgccttgcggtagaagccgagctcctgcactagckcattgatctcttcgcgggtcatttcactgagtgggatgcgctgaggcggaggaggggcggggtcagcaggctgggcctcgcctctggcctcgcccccagc

SEQ ID NO: 555831 - DNA, 201 bp, Homo sapiens
cctgtaatcctagctactcgggaggctgacgcaggagaatcacttgaacctgggaggcggaggttgcagtgagccgagatcgcgccactgcactccagccaggcgacagaatgagactctgactcaaaaaaaaaaaaaaaaaaaagtacctactaggacagtgttagctttcattatcagttccttccttacctcataaag

SEQ ID NO: 555832 - DNA, 201 bp, Homo sapiens
gacgaaagccttcacctggggaggaaccagagcatcagagaccatgacctcagtctactcgaggtacagacgagacactgaagcccagtgaggtcataaarcaagtcaggtgcaggctagactctcagcctaggctagactctcagcctagggatccttcccccctccccgccccagtcattgggaccatgttgcccactc

SEQ ID NO: 555833 - DNA, 201 bp, Homo sapiens
ccgcggccccgacctagcgggcgagcccggagcgcctgacctctccttccccgccagagtacatgaaccacctgaccgtgcacaacagggaggtgctgtasgagctcatcgagaagcgaggcccggccacgcccctcatcaccgtgtccaatcaccagtcctgcatggacgaccctcatctctggggtacccgggccagtg

SEQ ID NO: 555834 - DNA, 201 bp, Homo sapiens
gaaagctggtggccagtgtctctgttttggagggacctatgggggtaggcatcccgggagccaacatgaggcccagctccatcacatgccagcagaggggrcagaggctgtgggaggagggatgggtccttggaaagtcctcaactctctgcaactgcccagggatcctgtggacctggagccttggcattagaattcaag

SEQ ID NO: 555835 - DNA, 201 bp, Homo sapiens
gcctggctcctacccaccgcccttgccgaaccaggagctgctcactacctcctcagggatggccgttggccacgtcttccttctgcctgagcttccccccsaccacaggccctttcctcaggcaaggtctggcctcaggtgggccgcaggcgggaaaagcagcccttggccagaagtcaagcccagccacgtggagcctag

SEQ ID NO: 555836 - DNA, 201 bp, Homo sapiens
ccggcctgacctgcgaagggacctcggtccagtaccctgttgcgccgcgcccccgtccgtccgtgcgcgggccagtcaggggccagtgtgtcgaggcggtmgaggtcgcagcctagaggcgttccacaggtcggcccggggcgctgggagcccggccggcggtcgggtggggtggcctctgcacgtgaaagtggccgttcc

SEQ ID NO: 555837 - DNA, 201 bp, Homo sapiens
tggccctgtgggcccctggctcccgccccctcgggctggcttgtatgggggtagatgggcgtgtttgtagcgccaggaaggggacaggtgctgagactagrcctgcctctcgcaggggcttgcccaagggagctgaattgaactggaggatgtcgggggtggcagtggccagaggctggcacagaagcttggctcagggcc

SEQ ID NO: 555838 - DNA, 201 bp, Homo sapiens
gcgcgcccacggcctgtgacttcggagaccgctccccagtgacgagagagcggggccgggcgctgctccggcctgacctgcgaagggacctcggtccagtmccctgttgcgccgcgcccccgtccgtccgtgcgcgggccagtcaggggccagtgtgtcgaggcggtagaggtcgcagcctagaggcgttccacaggtcgg

SEQ ID NO: 555839 - DNA, 201 bp, Homo sapiens
ggaagggcactccctggggatatgggaagttggggcatgaagcctttcctgtcctctagggatcctgaaactccgccacatctggaacctgaagttgatghgttggtgaggaggaatgggcccctcgaagtgggccgggccggccccacctgcctctgcccagatttgccctcctcctgctctgcccaggaggtggcgtcc

SEQ ID NO: 555840 - DNA, 201 bp, Homo sapiens
aaccccgtctctactaaaaatataaaaattagccgaggctgggcgcgggggctcacgcctgtaatcccagcactttgggaggccgaggcgggtggatcacraggtcaggagatcgagaccatcctggctaacaggatgaaaccccgtctctactaaaaacacaaaattagctgggcatggtggcaggtgcctgtagtccca

SEQ ID NO: 555841 - DNA, 201 bp, Homo sapiens
tagcttctggctcccgggttgcttgggctggggctgtgggcactcctactgctcctcatcactcttggcggccaccccacagaaaatcactgtgctgatcrggaagcccttcagtgccctgcctgtactcgagcggctccgggcggagaacaagtcggctgtgagtttcctcctgggtcccccgtagctgtccccggaccc

SEQ ID NO: 555842 - DNA, 201 bp, Homo sapiens
ggggcaggactaattgcatctgtccctgcttaggacccctgcagctgcagacatctgcttcaccaaggagctacactcccacttcttcagcttgggcaagygtgtgcctgtgtgccgaggtgagctgctcctccagcgagtgcagggaggcacttctggggcaggaaagctggtggccagtgtctctgttttggagggacc

SEQ ID NO: 555843 - DNA, 201 bp, Homo sapiens
ggaaagctggtggccagtgtctctgttttggagggacctatgggggtaggcatcccgggagccaacatgaggcccagctccatcacatgccagcagagggracagaggctgtgggaggagggatgggtccttggaaagtcctcaactctctgcaactgcccagggatcctgtggacctggagccttggcattagaattcaa

SEQ ID NO: 555844 - DNA, 201 bp, Homo sapiens
actgatagggagaggccttttccttgcaggagatggcgtctaccagaaggggatggacttcattttggagaagctcaaccatggggactgggtgcatatcwtcccagaaggtcagcagggctgactgggtcgagcccccccagtatgagcgggatgggctcccaagcctcgcctctgtgctctctcaccagggaaagtgaa

SEQ ID NO: 555845 - DNA, 201 bp, Homo sapiens
tggaggatgtcgggggtggcagtggccagaggctggcacagaagcttggctcagggcccagcttatgctaacatttctacctcccccctgggcaggaatcrggcgcctgattgctgagtgtcatctcaaccccatcatcctgcccctgtggcatgtcggtgagcctggggacggggacagagagatggcatctggggtggg

SEQ ID NO: 555846 - DNA, 201 bp, Homo sapiens
ccagtgtctctgttttggagggacctatgggggtaggcatcccgggagccaacatgaggcccagctccatcacatgccagcagaggggacagaggctgtgrgaggagggatgggtccttggaaagtcctcaactctctgcaactgcccagggatcctgtggacctggagccttggcattagaattcaaggaggcattatcc

SEQ ID NO: 555847 - DNA, 201 bp, Homo sapiens
ggaggatgtcgggggtggcagtggccagaggctggcacagaagcttggctcagggcccagcttatgctaacatttctacctcccccctgggcaggaatcgrgcgcctgattgctgagtgtcatctcaaccccatcatcctgcccctgtggcatgtcggtgagcctggggacggggacagagagatggcatctggggtgggg

SEQ ID NO: 555848 - DNA, 201 bp, Homo sapiens
gaagcttggctcagggcccagcttatgctaacatttctacctcccccctgggcaggaatcgggcgcctgattgctgagtgtcatctcaaccccatcatcckgcccctgtggcatgtcggtgagcctggggacggggacagagagatggcatctggggtggggggcctgggactccctctggtcccaggctgccctgctcca

SEQ ID NO: 555849 - DNA, 201 bp, Homo sapiens
ctcaggtggagatgcggaaagccctgacggacttcattcaagaggaattccagcatctgaagactcaggcagagcagctccacaaccacctccagcctggragataggccttgcttgctgccttctggattcttggcccgcacagagctggggctgagggatggactgatgcttttagctcaaacgtggcttttagacaga

SEQ ID NO: 555850 - DNA, 201 bp, Homo sapiens
cgtcaagcggcccgtgcgcgctttcgacagtcggtcgggctgggcaccggcgcaggttcgctttccggcggttgcaccgggccggggtgccagcgcccgcyttcccgtttcctcccgttccgcagcgcgcccacggcctgtgacttcggagaccgctccccagtgacgagagagcggggccgggcgctgctccggcctgac

SEQ ID NO: 555851 - DNA, 201 bp, Homo sapiens
tggctcagggcccagcttatgctaacatttctacctcccccctgggcaggaatcgggcgcctgattgctgagtgtcatctcaaccccatcatcctgccccygtggcatgtcggtgagcctggggacggggacagagagatggcatctggggtggggggcctgggactccctctggtcccaggctgccctgctccaccccac

SEQ ID NO: 555852 - DNA, 201 bp, Homo sapiens
ctggggcaggaaagctggtggccagtgtctctgttttggagggacctatgggggtaggcatcccgggagccaacatgaggcccagctccatcacatgccascagaggggacagaggctgtgggaggagggatgggtccttggaaagtcctcaactctctgcaactgcccagggatcctgtggacctggagccttggcatta

SEQ ID NO: 555853 - DNA, 201 bp, Homo sapiens
aggctgccctgctccaccccacgtctggccttctgtccactgtgctgcaggaatgaatgacgtccttcctaacagtccgccctacttcccccgctttggayaggtgggtggggactgctgaccttcggctgtctgcctgtctgctgtctgctccgtgtctcccactcagcactatggaggccagctgcaggaggagctgag

SEQ ID NO: 555854 - DNA, 201 bp, Homo sapiens
gggactgagggggatagtccccaacacatgggccccagggagaagggcctgtttcattgaggtttggagagtgttgagggtaagctaacctgtcaccccaygcccccgagaatggttactgatagggagaggccttttccttgcaggagatggcgtctaccagaaggggatggacttcattttggagaagctcaaccatgg

SEQ ID NO: 555855 - DNA, 201 bp, Homo sapiens
gtcagcagggctgactgggtcgagcccccccagtatgagcgggatgggctcccaagcctcgcctctgtgctctctcaccagggaaagtgaacatgagttcygaattcctgcgtttcaagtggggtaagggctgctggtctctggccacagccatcctcccggcccagagatggccctgtgggcccctggctcccgccccct

SEQ ID NO: 555856 - DNA, 201 bp, Homo sapiens
agcctgggtgacagagtgagactccgtctcaaaaaaaaaaaaaaaagtgccggccacggtggctcatgcctgtaatcccagcactctgggaggccgaggcrggcggatcacgaggtcaggaattcgagaccagcctaaccaacatggtgaaaccccgtctctactaaaaatacaaaaattagccgggcgtggtggtgtgtg

SEQ ID NO: 555857 - DNA, 201 bp, Homo sapiens
ccttggccagaagtcaagcccagccacgtggagcctagagtgagggcctgaggtctggctgcttgcccccatgctggcgccaacaacttctccatcctttytgcctctcaacatcacttgaatcctagggcctgggttttcatgtttttgaaacagaaccataaagcatatgtgttggcttgttgtaaaatgtctctggcc

SEQ ID NO: 555858 - DNA, 201 bp, Homo sapiens
ggctaacacggtgaaaccccgtctctactaaaaatacaaaaaattagctgggcatggtagtgggcgcctgtagtcccagctactcgggaggctgaggcagragaatggcgtgaacccggaaggtggagcttgcagtgagccaagatcacgccactgcactccagcctgggtgacagagtgagactccgtctcaaaaaaaaa

SEQ ID NO: 555859 - DNA, 201 bp, Homo sapiens
ataaagtaacagcaaataacaaagaggggcttttaatggaaagctgcagtgcctgcccctcacctccctagccccactcctcagaagcagccccctggagyggtttctctttctgctgcttttggaggctacttctgtctctgtaaaggaacttctgtctctgtaaaggaacaagcagaggccacagtgtcttggcaaatg

SEQ ID NO: 555860 - DNA, 201 bp, Homo sapiens
atcatcctgcccctgtggcatgtcggtgagcctggggacggggacagagagatggcatctggggtggggggcctgggactccctctggtcccaggctgccytgctccaccccacgtctggccttctgtccactgtgctgcaggaatgaatgacgtccttcctaacagtccgccctacttcccccgctttggacaggtgggt

SEQ ID NO: 555861 - DNA, 201 bp, Homo sapiens
tcagcagggctgactgggtcgagcccccccagtatgagcgggatgggctcccaagcctcgcctctgtgctctctcaccagggaaagtgaacatgagttcckaattcctgcgtttcaagtggggtaagggctgctggtctctggccacagccatcctcccggcccagagatggccctgtgggcccctggctcccgccccctc

SEQ ID NO: 555862 - DNA, 201 bp, Homo sapiens
gcctcccagagtgccgggattactggtgtgagccacctcaccctgccctagctcgattttctttccctctaagataaggctagggcctaccaattggaggaaaaaaaaaaaaaaaaaaaaaaaggcaaacccaatctctcaacggattctctccattcctattgggaccgttctctgggtttccatgggccctcagggggt

SEQ ID NO: 555863 - DNA, 201 bp, Homo sapiens
tggctagggaggcagcgattcccttaggtgagccaagattctcagcatttgcatgaaaagaagaactccgcagtccttttagtgcctgatgcaggggaagmggcgtgtgggaatcatcctctttagtttccccagggaaatcttgccagcgtttacatggcctaagaatctgttaaaggacaatcaaagaatattacaggg

SEQ ID NO: 555864 - DNA, 201 bp, Homo sapiens
ccaggctggtcttgacctcctgagctcaagagatccacccaccttggcttccaaagtgctgggattacaggcatgagccagcacacccagcccttgttttwttttctccccctttctttctttcttttttgtttttgttttgattaatcaagtcccatttttttctcctcttggttatttggatgttatgtacatatgtag

SEQ ID NO: 555865 - DNA, 201 bp, Homo sapiens
cccagctactcaggaggccgaggcaggaaaatcacttgaacccgggaggcggaggttgcagcaagccaagatcgtgccactgcactccagcctgggcaaayagaaggagatccgtctcaaaaaaaaaaaacaacaacactattttgaaaaaaacaataaagtttagaacactttgtgttggagagggtggtcttaacacct

SEQ ID NO: 555866 - DNA, 201 bp, Homo sapiens
agaagggagcgcggctgccagagggccaggagatgggggccagagagaaggggagactgagagaatatccttatgaaaatattgtttactgacatctgaakagactcttcaagaatgcactgaagaatatcttcatgtatctttaccaatacattgatgaagattgacttcatattcctgaggacagttaaaatcttgaat

SEQ ID NO: 555867 - DNA, 201 bp, Homo sapiens
gttgcagcggcatagcggctggccctgaccctgtggtggcaggggacaacatgggggtggcaagagtccggtagacacctggcactagttagggaggtggygtcctttggtcccagtcggctgggaaggtgggagtcaggaccggagtcgcctcgccagctctggtctcttcacatgtgctcctagctgagctggggcaca

SEQ ID NO: 555868 - DNA, 201 bp, Homo sapiens
tcaccagcagctccaggagctggaggaaggctgcaggcccgagggcttactgctgatggcagaaagcgacccagccaactgcgagccacccagtgagaagsccctgctttcagagccccccgagccaggtggggaagacgggccggtcaacctgcctcatgccagcaggcccttcatcttggagagtcgcttccagagctt

SEQ ID NO: 555869 - DNA, 201 bp, Homo sapiens
cttatgccctggtccgctgccagttggggcgactgaataaagctgctatgaacgttctcgcacaagtctttctgtgaacatatgctttcatatatggaatkgctagataacagggaagtgttatgtgtcttagtcccactttctgttgctgtaacagagtaccgcaggctgggtggtttataaagaaaggaagttcaatgt

SEQ ID NO: 555870 - DNA, 201 bp, Homo sapiens
actgcaggctaaactgcaggctagacttcgtgctcaacactggtcctgggggatttgcggaactgaagagcacacacagatagttcacactgtcatttctrcaacttctagtctgtggctatttttgtaaagctgttacaaaagagtaactacatataaaatatatatgaatattggtgtgcgtgtggctggtgtgtgttt

SEQ ID NO: 555871 - DNA, 201 bp, Homo sapiens
ttctttagctcctctgtacaatttaccaacagtctctccagccatatcaaatctgccattaaatccatcaattgaacatattattatttattatttatttwttttttgagacggagtctcactctaccacccaggctggagtgcagtggcacgatctcagctcactgcaacttctgcaccccgggttcaagcggttctcct

SEQ ID NO: 555872 - DNA, 201 bp, Homo sapiens
tggctttcttttttatttttcctgagtctttggataggcaaaagttctttctttctttctttctttctttcttctttttctttttctctctttctttccatctctctctctctctttctttctttttctttctctctttctctttcttcctttctctctgtctctctctctctctctctatctctctttctttctttcttt

SEQ ID NO: 555873 - DNA, 201 bp, Homo sapiens
ggctttcttttttatttttcctgagtctttggataggcaaaagttctttctttctttctttctttctttcttctttttctttttctctctttctttccatctctctctctctctttctttctttttctttctctctttctctttcttcctttctctctgtctctctctctctctctctatctctctttctttctttctttt

SEQ ID NO: 555874 - DNA, 201 bp, Homo sapiens
tgttggccaggctggtctccaactcctaatctcaaatgatccacctgccttggcctcccaaagtgctgtgattacaggcgtgagccaccactcccggccartgactcttgataaattcatcaatggagcaccctaggttgatgagctcagggatttggccaagatctcgacctgaccctgccttcctcttctttccctgag

SEQ ID NO: 555875 - DNA, 201 bp, Homo sapiens
acctcctcagcacaagccagtctcctgggggaccagaaggccccggtccctcagtttcttcgtgggtcaggaggaaagaaggcttgagaaactcagaaaaygttcattggtagaagagatggcaccccaggaaggcatggggagccttcaagtaaaagtctcgactggccaggtctcatctgggcaccttgcatgcagagt

SEQ ID NO: 555876 - DNA, 201 bp, Homo sapiens
ctcttgatacagcggtgactaccggggagcagggcaatacctctgtctctccccctctcagacttttgctgcaaattctagaagcctgcacttctgacccsgtaccccccattggactgtgacatgggatgtctggttgtttgctgcagcagcgagcctacccttactaatgttcatcgtgagcagaaaagcaggtctaca

SEQ ID NO: 555877 - DNA, 201 bp, Homo sapiens
ttgatgattctggatggaagggtctttgccaagcttccctttctttcttgtggaaataggaggagcttcagatctccgagaagatgcacagtgagcggcckacctcctcagcacaagccagtctcctgggggaccagaaggccccggtccctcagtttcttcgtgggtcaggaggaaagaaggcttgagaaactcagaaaa

SEQ ID NO: 555878 - DNA, 201 bp, Homo sapiens
ttgattctgcgaagtgcagggtctctatcacagcaacaattagactcaggaggcttggggctggccctggggtctcctccttcatgaggtctgggtttgtrggtccttgcagaggacgttcctgggtcctggaaggactgtgactgcttccgctggagttgcttgaggcccctggtaactctcctctctgtgtgctgagga

SEQ ID NO: 555879 - DNA, 201 bp, Homo sapiens
tgtgactgttgcgtcccctctggtgcatcacaaactgagaatccatactgcaagtcctgtgctgtttatcacagttaaatccgtttgctttcaggagggcygttgtggtttttatcattatggtttctttttaatttggtctcggcatgtctctactgagagtggccatagccgagatacccagtttctaggagatccctg

SEQ ID NO: 555880 - DNA, 201 bp, Homo sapiens
ggggaccagaaggccccggtccctcagtttcttcgtgggtcaggaggaaagaaggcttgagaaactcagaaaacgttcattggtagaagagatggcacccmaggaaggcatggggagccttcaagtaaaagtctcgactggccaggtctcatctgggcaccttgcatgcagagttgcaggaggccccctctagcctcctaa

SEQ ID NO: 555881 - DNA, 201 bp, Homo sapiens
gtgagccactgtgcctggacagttcttactttttaatgcattttttaattgattgtggtaaaaaaaaaaaacccacaatatattctttttgattctgcgamgtgcagggtctctatcacagcaacaattagactcaggaggcttggggctggccctggggtctcctccttcatgaggtctgggtttgtaggtccttgcaga

SEQ ID NO: 555882 - DNA, 201 bp, Homo sapiens
ctggccacggcctccccaagtactggggttacagatgtgagccactgtgcctggacagttcttactttttaatgcattttttaattgattgtggtaaaaamaaaaaacccacaatatattctttttgattctgcgaagtgcagggtctctatcacagcaacaattagactcaggaggcttggggctggccctggggtctcc

SEQ ID NO: 555883 - DNA, 201 bp, Homo sapiens
ctcccaaagtgctgggattacaggcatgactgcagccggccaatgtcttggaactattaatagccatggtggttgcacaacaccacatgtgctaaatgccrctgaattgttcaccttaaaataattcattttatgttacatgaaatttacctcaataaaaattgaataaaaaagaagctactcaggtgccgagtaggcaaa

SEQ ID NO: 555884 - DNA, 201 bp, Homo sapiens
ctctctctctctctctatctctctttctttctttctttttcttcagggtctctgttgcccaggctgcatgcagtcatagttcactacagccttgaactccygggctcaagcgatcttcctgcctcagcctcccgagtagctgggagtacaaagcatgtgccaccatgcctggctaactttttaaaaattattattatttgt

SEQ ID NO: 555885 - DNA, 201 bp, Homo sapiens
cgggttcaagcggttctcctgcctcagcctcccgagtagctgggactacaggcgtgtgccaccacgcctggctaattttgtatttctagtagagatggggyttctctgtgttggtcaggctggtcttgaactcccgacctcaggtgatccgcccgcctcggcctcccaaagtgctggaagtacaggtgtgaaccactgtgc

SEQ ID NO: 555886 - DNA, 201 bp, Homo sapiens
gtatccacaagtgggcagtcgtgaaattttcttatagcctcctgtcatattgaaaacgcccggaagtgaatatgccaggtctccatgtttttctttccctyctggacacgaggtccttgggggcatccagaccctagctcctctgtcccaagactgttctggtatgtttcgctttcagacgaggcttggagataacaggct

SEQ ID NO: 555887 - DNA, 201 bp, Homo sapiens
gttcactaatgttgtagcacgtatcagtacttcattctcttgacggctgactaatattccagtgcatgggtagaccacattttgtttatctgtccatcagyggatggagatttgagttgtttccaccttttggctattgtgagaagccctgcgctgaacactcagatacatgccagttgtttgaacaccagttttcaattc

SEQ ID NO: 555888 - DNA, 201 bp, Homo sapiens
gagataagaagctactcaagtcagaaagcagattggtggttaccagggactggggtgatggggaatggggagtgactgctaaatagtattttttcgaggcrgtgatgaaaatgttttggaacaattttttttttttttttgagacggagtctcgttctgtcacccaggctggagtgcagtggcgtgatctcggctcactgc

SEQ ID NO: 555889 - DNA, 201 bp, Homo sapiens
ttttgtgttcataagagcattctccagagttgtccatttgcttttgtgactgtaggaggtggagagaggggggtccttgaccaaggaagagaagggagcgyggctgccagagggccaggagatgggggccagagagaaggggagactgagagaatatccttatgaaaatattgtttactgacatctgaagagactcttcaa

SEQ ID NO: 555890 - DNA, 201 bp, Homo sapiens
ttactgaatgaccttggacgaggtgcttcaagtttgcaatcctcagtttccacatctgtaacatggaggtaaaaatgatcccactattgttggaactgttktgagaattaattaatacttgtgtgtaagccccaagtagatgctgatggaactgaatttacaattcctttctgcttcctatgtgcaaactaagtccttgaa

SEQ ID NO: 555891 - DNA, 201 bp, Homo sapiens
ttcctccaagttgtgggccatgattaggctctagctcaatttgccaaaagcaaattctcagaaatgaccaagaatatactctttctggctgggcccaatgrctcacacctgtaatcccagcactttgggaggccgaggcaggcgggtcacctgaggtcaggagttggagaccagcctggccaacatggtgaaaccctgtct

SEQ ID NO: 555892 - DNA, 201 bp, Homo sapiens
cctctcagagcagctgagagtggagaaggccagtcgggatggcaacactgtgagctacctcaagctggtatccaaagcagaccggcaccaggtgccgcacrtccagcaggcctttgagaaggtgaaccagcgcgcctctgccaccatcgcccagatcgagcacaggctccaccagtgtcaccagcagctccaggagctgga

SEQ ID NO: 555893 - DNA, 201 bp, Homo sapiens
cctgggccttcctctcggactgctggacccccagccaggagagaggccatctctgctgggaaagccactcaaagtttgtaacgctttgtgatggcagccasaggaaactcccacactcagcttgtcctttaggctctgctctgatgtcctctcctcaaagggacttcccaggctaccacgttcaaatggcctcttctttta

SEQ ID NO: 555894 - DNA, 201 bp, Homo sapiens
tgcttcttttttttgtcttttttatgagatggagtctcactctgtcccccaggctggagtgcagtggcacgatctcggcccactgcaacctccacctcccsggttcaagcgattctcctgcctcagcctcccgagtagctgggattacaggcacacgccagcatgcctggctactttttgtatttttcagtagagatgggg

SEQ ID NO: 555895 - DNA, 201 bp, Homo sapiens
gcgtgattttctttctctcttcttttttgtgccgctgactctccccttggtgtgattttctttgcattcatcctgcttgggcttcgcattgctacttgggkttatggcttgatgtcttttgtcagttttggacgttttcagccattatattttcaaatagtgactctgccctagtctctcatttttccccttctaaggccc

SEQ ID NO: 555896 - DNA, 201 bp, Homo sapiens
caaaaatgttttaaaacaagtccacaatgttaaatatgcagtcactgtcaccttattgcctcacacatgccatcattcctttttatttctgaaggaattcttttttttttttttttttgtgagacagagcctcaccctgtcacccaggttggagtgcaatggtgagatctcggctcgctgcaacctctgcctcccaggttc

SEQ ID NO: 555897 - DNA, 201 bp, Homo sapiens
caggcatgtgccaccacgcccggctagtttttgtatttttagtagagacggggtttcaccatgttggccaggccggtcttgaactcctgacctcgtgatcygcctgcctcggcctcccaaagtgctgggattacaggcgtgagccaccacacccggccctgaaggatattttttgctggacatagaattctaagttggcac

SEQ ID NO: 555898 - DNA, 201 bp, Homo sapiens
cctcagcctcctcagtagctgggattacaggcatgtgccaccacgcccggctagtttttgtatttttagtagagacggggtttcaccatgttggccaggcyggtcttgaactcctgacctcgtgatctgcctgcctcggcctcccaaagtgctgggattacaggcgtgagccaccacacccggccctgaaggatatttttt

SEQ ID NO: 555899 - DNA, 201 bp, Homo sapiens
actcatgctaccttccatgtcttctatttttcaagttttctatttttttgtgcctctgtgctgcattctggatacttttttttctttctttcttttctctttctctctctctctctctctctctctctctctttctttcttgggatggagttttgctcttgttgcccaggttggagtgcagtggcgtgatctcggctcact

SEQ ID NO: 555900 - DNA, 201 bp, Homo sapiens
ctcatgctaccttccatgtcttctatttttcaagttttctatttttttgtgcctctgtgctgcattctggatacttttttttctttctttcttttctctttctctctctctctctctctctctctctctctttctttcttgggatggagttttgctcttgttgcccaggttggagtgcagtggcgtgatctcggctcactg

SEQ ID NO: 555901 - DNA, 201 bp, Homo sapiens
tcatgctaccttccatgtcttctatttttcaagttttctatttttttgtgcctctgtgctgcattctggatacttttttttctttctttcttttctctttctctctctctctctctctctctctctctctttctttcttgggatggagttttgctcttgttgcccaggttggagtgcagtggcgtgatctcggctcactgc

SEQ ID NO: 555902 - DNA, 201 bp, Homo sapiens
atgctaccttccatgtcttctatttttcaagttttctatttttttgtgcctctgtgctgcattctggatacttttttttctttctttcttttctctttctctctctctctctctctctctctctctctttctttcttgggatggagttttgctcttgttgcccaggttggagtgcagtggcgtgatctcggctcactgcaa

SEQ ID NO: 555903 - DNA, 201 bp, Homo sapiens
gagcagtttattaacttgctcaaggtctcagagtggtagagccaggatttgaactgggctcttcgtcaaaggcaatgttaatcccctcaccatgtgagagrctcattcttttgtgttacagtagaattttctgccgtagactgtcagctgtatgagatcaaggaatgtatctggcttctgtaccacgtggtaggcactcag

SEQ ID NO: 555904 - DNA, 201 bp, Homo sapiens
tgatggctgttctgtgagtacctgtttcatggatcagtctggatgctgcttttcctcccttcctgaagggacccagctcgccctctgggctgcctccctcstccatgtatgtcagaactctatctgctgtgtcttgggaacatcagggcagggccaggagggctgattctggatttaggcctggcccagcctcctctctgc

SEQ ID NO: 555905 - DNA, 201 bp, Homo sapiens
ctcaccatgtgagagactcattcttttgtgttacagtagaattttctgccgtagactgtcagctgtatgagatcaaggaatgtatctggcttctgtaccaygtggtaggcactcagagaaagtatgtgttgaatgaatgattggatgaatgaatgaacctgttaggaggcaaatctctctgcctaacccttcctgtctccc

SEQ ID NO: 555906 - DNA, 201 bp, Homo sapiens
tatgtttcaagcctttttttttcttgtttgcttttatttatttattttttgagatggggtctcagtctgccaccctggctggagggcagtggtgcgatcayggcagcctcgacatccccgggatcaagcgatcctcccgtctcagcgtcctgggtagctgggactacaggtgtgcaccaccactccaggataattgttgta

SEQ ID NO: 555907 - DNA, 201 bp, Homo sapiens
cctttttttttttttccaacagatgtaactgtgaagtggtatctcattatgagggctggctttcttttttatttttcctgagtctttggataggcaaaagttctttctttctttctttctttctttcttctttttctttttctctctttctttccatctctctctctctctttctttctttttctttctctctttctcttt

SEQ ID NO: 555908 - DNA, 201 bp, Homo sapiens
ctttttttttttttccaacagatgtaactgtgaagtggtatctcattatgagggctggctttcttttttatttttcctgagtctttggataggcaaaagttctttctttctttctttctttctttcttctttttctttttctctctttctttccatctctctctctctctttctttctttttctttctctctttctctttc

SEQ ID NO: 555909 - DNA, 201 bp, Homo sapiens
tttttttttttttccaacagatgtaactgtgaagtggtatctcattatgagggctggctttcttttttatttttcctgagtctttggataggcaaaagttctttctttctttctttctttctttcttctttttctttttctctctttctttccatctctctctctctctttctttctttttctttctctctttctctttct

SEQ ID NO: 555910 - DNA, 201 bp, Homo sapiens
ttttttttttttccaacagatgtaactgtgaagtggtatctcattatgagggctggctttcttttttatttttcctgagtctttggataggcaaaagttctttctttctttctttctttctttcttctttttctttttctctctttctttccatctctctctctctctttctttctttttctttctctctttctctttctt

SEQ ID NO: 555911 - DNA, 201 bp, Homo sapiens
atttacatgactctggtgttgagcattaggtcttatcgtggtcagcagccgtgggatgtgttgggttttgggtcagtgaggcgaggaccacgtgggctatrtcgcaaacaatcacatgacagggagggaggggtgttatctagggcaaaggtgacagggtacaactgctaaagttggatgctgaggcagcaactgtattaa

SEQ ID NO: 555912 - DNA, 201 bp, Homo sapiens
aagcaacagcagaacttggtggcagttacaaacttccccgtatgtttccaagccacaggggccaatgagaatgctgtgctcaggtaaactcttaacccctstcaaatccgagtctttcgccccctcttgatacagcggtgactaccggggagcagggcaatacctctgtctctccccctctcagacttttgctgcaaattc

SEQ ID NO: 555913 - DNA, 201 bp, Homo sapiens; identical to SEQ ID NO: 404759

SEQ ID NO: 555914 - DNA, 201 bp, Homo sapiens
gggagggagggtttgcatctgcgggtaaggccagaaacagtcagggcaagaggactcccaagtgtcctccctgactcccacaggggcagaagggcaaacasggcccagagaggggaggggcggtgcccagggtctcacagcgccagccctcccaccccacactctgcccatggcgggtggggtaggggatcctaacttctt

SEQ ID NO: 555915 - DNA, 201 bp, Homo sapiens
gacttacgtgtccaaagaaaagaaaaggcagcaggaaggtgaggccccgccacatccaggactggaagccctctgcggggaggaaggtcagggcacaggayggccagggacagaggggacgctaccactcagacccgggatgggaggaaaggggaatgtccagatgccagggccactcccgactcacccacagtgaggtcc

SEQ ID NO: 555916 - DNA, 201 bp, Homo sapiens
cgaagcctgggccgggcggaggacagaggagcagggctgagccccgggaggggttccctgcccctgccccccaccacgggtgcctccagggctcagcacaracatctgggacactcactctggtacatggaaaaggagaggaattggttccggaatttctggtacatgagaccgtcgggcctaaggtaaaaagtggagggc

SEQ ID NO: 555917 - DNA, 201 bp, Homo sapiens; identical to SEQ ID NO: 404824

SEQ ID NO: 555918 - DNA, 201 bp, Homo sapiens
cctttggcccaaggattccccaagcactttgccctggtaggtgagtctcaagaaggcgcagcctagagatggggcaaggggcagtgtgaggagagccaagmaggggctgtggccaggacagcggcggccaggcggggagactgggtctgctcagtctctggggagaagcaccaatggcaggggccttggcagggccagggg

SEQ ID NO: 555919 - DNA, 201 bp, Homo sapiens
ctgcagacccactccctgccatgcccagccttcctggccgcctgctccggaatcctgacccccggaggaaacagtgttcccccccatctccagagtcttgyctgaaactcccccacctcagggcacaagagaacccggctctccctccctgctgagggccgtccccctgtccccgattgctcccctgtgcgatggccacca

SEQ ID NO: 555920 - DNA, 201 bp, Homo sapiens
caggccggtgagacgggtggggtgctggtggggcccatgtgtgcccccaccccgggagggcagctgagccaagggtagtcggatggaggagaaggccgggktggggggtggaggggaaggccaggtggggtggggggtggaggggaaaaccaggttggggggaaagccgggtggaggggtggaggggaaggccgggtgggg

SEQ ID NO: 555921 - DNA, 201 bp, Homo sapiens
ggggtggcggggtgaggagaagcccgagtgacagacaagccaccggtactcagccaagcctgccaggccagagcctgggccaccaccccaccccctcaccygctgctttccgcagggccttggcatcgggttctgaccttggaggctgcagacccactccctgccatgcccagccttcctggccgcctgctccggaatcct

SEQ ID NO: 555922 - DNA, 201 bp, Homo sapiens
catggaaaaggagaggaattggttccggaatttctggtacatgagaccgtcgggcctaaggtaaaaagtggagggcagtgtggggacccttggggatgccrtgtatcccctccttgtcccagctcctgcccctgccggggcccagccactcaccacgtcagcatgactcccgacaggaaggtggacacgtagtgatggaac

SEQ ID NO: 555923 - DNA, 201 bp, Homo sapiens
ctgccactccttgcactgagggtcctgggccaggttgaacaacgtcagcgcgttaaaaagctgccagaactaagcagggaggaggcattttactcagaagwaccagtccctgctggagcccgaaaccggcgcagaggacggacagacaggcagggacacagaggcacgacttacgtgtccaaagaaaagaaaaggcagcag

SEQ ID NO: 555924 - DNA, 201 bp, Homo sapiens
tgccactccttgcactgagggtcctgggccaggttgaacaacgtcagcgcgttaaaaagctgccagaactaagcagggaggaggcattttactcagaagtmccagtccctgctggagcccgaaaccggcgcagaggacggacagacaggcagggacacagaggcacgacttacgtgtccaaagaaaagaaaaggcagcagg

SEQ ID NO: 555925 - DNA, 201 bp, Homo sapiens
ttagctactggttaagaggctggggggggtgcacatatatacacacatgtaattgtgtgtgtgtgcttgtatatatgcttgcattgatcaacagcttcccrtttatgagactgaagaagaaagatcagacgacttcatacaaaataaatcctttatcagaaaccaaggaagatcggaaattagcctaaattacctacttga

SEQ ID NO: 555926 - DNA, 201 bp, Homo sapiens
caccagttattctttggtgatcctatggagcttttgctgaagtgaagctactgctttgttctttgattaatctgtcagttcgttttcttttcagctaatgyaatgataagattggcataagttactagctcattcaacctgtagatgctaattaagtttttatcttaaaggttttgatttgtggtgtgctgtttgtttttt

SEQ ID NO: 555927 - DNA, 201 bp, Homo sapiens
atggggtttcaccatgttggccagcatggtctccatctcttgacctcgtgatccacccacctcggcctcccaaagtgctgggattacaagcgtgagccacygcgcccggccactaataatttttaaaagcccctagaactaccgtagcttctaaaaagggaggaaaggaacgattcacaagtattgaattaagaaaagaga

SEQ ID NO: 555928 - DNA, 201 bp, Homo sapiens
ccaaatttcaagtgcctcagtagctatatgtggctagtagcaactgcgtaggaatagcacagataagaaacatgtccatcatccagaaaatagtctccttytgtcaaccaggttggagtccagtggtgcaatcacggctcactgcagccttgaccactcagacccaagcaattctcctgcctcagcctcctgagtagctgg

SEQ ID NO: 555929 - DNA, 201 bp, Homo sapiens
aaatgtatagttttcatgtgaactgattggcaagaagtgatgctaagttacaatgtaaatactgggatttctttcttaattatagcttttataattagaaygcagacaatctgtagggctatacagcttttacaaattaaaaaaatattttcccagatcttattcttgatagtctttttcactggagctgactagcttaca

SEQ ID NO: 555930 - DNA, 201 bp, Homo sapiens
caggcccctcctcgctttcgccctccatcctgctcacgcgagacttgagcaaggcaggggggcgggaagggagtcggagacacaacaaagatggcggcggygactgtgacggtgacgaagacggcggcggcggcgacggcatttaacaaggcggtgtggtttactccatgcagttgtcaggaggtaagtagcaggctgccg

SEQ ID NO: 555931 - DNA, 201 bp, Homo sapiens
ggaaaattattcattaaatagtttgagtttagaaaaagaagattttataaggtatatttaccagagaattgtacttatttgcataaaaattgtttttcctrgaagaaaagaccttttttatcccaggtgctagacttcatcttattcttactagaaaacttttttggctattttatttgtgaatttgggccataaacctat

SEQ ID NO: 555932 - DNA, 201 bp, Homo sapiens
tgtggttgaaaagcagcacacaatttatggcaaggaacacagtgaagtttataatgtgacaatgtgataatagccaagactgtcaaaatatgccagccatyctctgtaattaggctcatttgtgttcttaaacttgagatgcatgtataaaaatatcattttcttctgcttgctttctggcagtcttgtgtgtttttactg

SEQ ID NO: 555933 - DNA, 201 bp, Homo sapiens
tgtgtgaatatgaatgtatataaatgtatacatgaatatataactgagacatacttttgataaactcattattatgtaagactattactagaatatttcarttgtactgtttcttctctctaaatgcattcgaagccataacagtttttatactgtattgactaatacaacatcaatgcatatttcaggttgttgctgatg

SEQ ID NO: 555934 - DNA, 201 bp, Homo sapiens
aactgagacatacttttgataaactcattattatgtaagactattactagaatatttcaattgtactgtttcttctctctaaatgcattcgaagccataayagtttttatactgtattgactaatacaacatcaatgcatatttcaggttgttgctgatgagttcttaagctttatttcaatttgtgggtttatttacaaa

SEQ ID NO: 555935 - DNA, 201 bp, Homo sapiens
gtgagggcaggagaggggccaaggggggcaggttggtttgtcatagaaatagttttaatattcaaaaatgaaggtttatgtaaagttcgaataaatgggamagttactccatttttcaaagcaacaacataacaacatacaaacaggtcagaagtgatgccctttgtagatcctctccttccttagccgtgtttccctctt

SEQ ID NO: 555936 - DNA, 201 bp, Homo sapiens
acgagcactcccagcataggaaacagccagccaagcaccccagccccagccctgccggtccaggaccctcagcttctgcaccactgccagcactgtgataygtactttgcagacaacatcctttacactattcatatgggatgtcatgggtatgaaaatccttttcagtgtaatatatgtggatgcaaatgtaaaaacaag

SEQ ID NO: 555937 - DNA, 201 bp, Homo sapiens
ttatacacgtactatgattgcgtgtagctgttactgtgaagaccactgcgcattaatgtgaatcattctgttttttctagaaagatacagggcattttttyccccttttttaaacatatcagacttctgctggagagtacttaacatggtctggagatgcattatggtcttgttggaaggttaggggctccaaataccctt

SEQ ID NO: 555938 - DNA, 201 bp, Homo sapiens
atggagcttttgctgaagtgaagctactgctttgttctttgattaatctgtcagttcgttttcttttcagctaatgtaatgataagattggcataagttastagctcattcaacctgtagatgctaattaagtttttatcttaaaggttttgatttgtggtgtgctgtttgttttttatgcagacctctgtatggcttttc

SEQ ID NO: 555939 - DNA, 201 bp, Homo sapiens
gattttgcctgtcattttgcaagagggcaacataaccaacattgattgaaaatagtcatattttacttagttttgctgtttttgtggtttggttttttttkttttttgttttggtcatccctaataaagtgtctgctaattcaaggcttatacattatatttatagaatataaatttgtcagtggaataaaatttcccctt

SEQ ID NO: 555940 - DNA, 201 bp, Homo sapiens
ccattttctgatagcctaccatatgtgatacatgtcacaatatgctttatgtatacttacctataaaacttaagatagcactgcaagttggattatgattmcattttacaaaataggaaactaaggctgagagaggtccctgttcatagtcttaaagttgtccctccatatctggtaggtactggttccaggacccctgta

SEQ ID NO: 555941 - DNA, 201 bp, Homo sapiens
ttcatgtgaactgattggcaagaagtgatgctaagttacaatgtaaatactgggatttctttcttaattatagcttttataattagaacgcagacaatctrtagggctatacagcttttacaaattaaaaaaatattttcccagatcttattcttgatagtctttttcactggagctgactagcttacattttcccaccaa

SEQ ID NO: 555942 - DNA, 201 bp, Homo sapiens
ggggcggggactgttgcttggctctgacaggtggttctgcgggaggcgtcccgaggtttgcgtcttcacggggtcccaggggctgggagtcagccgggcgmgggtctcctaggtgtttcgaatcctggcgaggatgtcgctccgaatcttggtgaggctgctgccccgacgccggtcccaggctgatcgttgggagaagga

SEQ ID NO: 555943 - DNA, 201 bp, Homo sapiens
agtcagccgggcgagggtctcctaggtgtttcgaatcctggcgaggatgtcgctccgaatcttggtgaggctgctgccccgacgccggtcccaggctgatygttgggagaaggacgtttaaagccttcgtattttatctaatgatcctgcccggatccgtctctactgcatgggcacccttattttaggaacatgtgagat

SEQ ID NO: 555944 - DNA, 201 bp, Homo sapiens
atgtgaacactatgtctaagagcctttgctggtagttactagctgcatgcagctatttctatttaaattaataacattaaaaactcaggtcatatgtattagccaaatttcaagtgcctcagtagctatatgtggctagtagcaactgcgtaggaatagcacagataagaaacatgtccatcatccagaaaatagtctcct

SEQ ID NO: 555945 - DNA, 201 bp, Homo sapiens
ggagctgggttcgtggcgggccggctgatccggacggagactcagttcagtggagggtcgggcgtggtcggtaggcgggcaggtgatggcccgggacctcyttagccggagggcagtggactgcggcgcctatggccgcgagaaccccgagggagcggggtctcctgctgtcattgccttcgagcaggagctcggaggctc

SEQ ID NO: 555946 - DNA, 201 bp, Homo sapiens
tttatacacgtactatgattgcgtgtagctgttactgtgaagaccactgcgcattaatgtgaatcattctgttttttctagaaagatacagggcatttttycccccttttttaaacatatcagacttctgctggagagtacttaacatggtctggagatgcattatggtcttgttggaaggttaggggctccaaataccct

SEQ ID NO: 555947 - DNA, 201 bp, Homo sapiens
tcccttgctgtatctccgaagtaaatttcaattactctacatttcatcaatgttggagtggcaagaaaaaggaggaacagatttggggtgaaaaggttagwttgtataatttctcttctggatttctttcaacatggttttacttatgttttatttttatgttttgatttctgatttctcagagcctcataatttcttttt

SEQ ID NO: 555948 - DNA, 201 bp, Homo sapiens
atgtaattgtgtgtgtgtgcttgtatatatgcttgcattgatcaacagcttcccatttatgagactgaagaagaaagatcagacgacttcatacaaaatamatcctttatcagaaaccaaggaagatcggaaattagcctaaattacctacttgaggtagaggttttcctgttctttgggatatcaaagcttaattctctt

SEQ ID NO: 555949 - DNA, 201 bp, Homo sapiens
tacctaatacaatgtaaatgctatgtaaatagttacactgtattgtttagggaattatgacccccccccccacaaaagtctggtgaaaccccctctctacyaaaaatacaaaaaatatcagccgggtgtggtagcgggcacctgtaatcccagctactctggaggctaaggcaggagaattgcttgaacctgggaggcaga

SEQ ID NO: 555950 - DNA, 201 bp, Homo sapiens
tgcaacctctgcctcctggattccagcgattctcatgcctcagcctcctgagtagctgggactacaggtgtgcaccaccatgcccagctaatttttgtaatttttttttttttttttaagtagagacagggttttgccatgttggctaggctggtctctaactcctggcctcaagctatccccccacctctgcctcccaaa

SEQ ID NO: 555951 - DNA, 201 bp, Homo sapiens
aaaaaggggaataacggaatcaggggtggtgagaattttaaaatctaagttataaccattttttctatttgctacaaaaataattattagaaaaatagccrccattttctgatagcctaccatatgtgatacatgtcacaatatgctttatgtatacttacctataaaacttaagatagcactgcaagttggattatgatt

SEQ ID NO: 555952 - DNA, 201 bp, Homo sapiens
gcaacctctgcctcctggattccagcgattctcatgcctcagcctcctgagtagctgggactacaggtgtgcaccaccatgcccagctaatttttgtaatttttttttttttttttaagtagagacagggttttgccatgttggctaggctggtctctaactcctggcctcaagctatccccccacctctgcctcccaaag

SEQ ID NO: 555953 - DNA, 201 bp, Homo sapiens
gtaactaagaaacagatgctcagtatatttttcaaccacgttgatgaacccatagaaaaaggggaataacggaatcaggggtggtgagaattttaaaatcyaagttataaccattttttctatttgctacaaaaataattattagaaaaatagccgccattttctgatagcctaccatatgtgatacatgtcacaatatgc

SEQ ID NO: 555954 - DNA, 201 bp, Homo sapiens
caattttgaagggatgctttgcataactcagactagcaagcccatttcaattctgagctttctatttcatataaggactttaaaaaaagctttttttgtatttttttttctgtgagcaaagggtatgcatatgtgtgtgtgtgaatatgaatgtatataaatgtatacatgaatatataactgagacatacttttgataaa

SEQ ID NO: 555955 - DNA, 201 bp, Homo sapiens
gacttgagactgatgataattacatcaaagacaggaaaatggctcagatagaaaacctttattttctttctataagaggaagtcttttgtagttccagaawttttttttttcttttaaaaattagagatgaggtctcgctctgttgcctggactggtcttgaactcctgagctcaggcagtcctcccaccttagcctctga

SEQ ID NO: 555956 - DNA, 201 bp, Homo sapiens
cgatgtgataaaatgttttaatctttatcctattacgtttcatttgccgaaagggggaaaggtttcagaaagtatacagttgcagatggtactgctaatcmcagatctcactttagctgtcccttctgagaaactttcccaactacatctgccctctgcccaagaccaggtcagacgtccttcctgtgtgcttcatgcatc

SEQ ID NO: 555957 - DNA, 201 bp, Homo sapiens
tttacctatccaagaagagaaatgaaaatagagaaagtggtgacctccttgagcctgctagaggtaaattttgtctaatttgcttgccacaaaaaactggwatttattcctaacctagctcggaggtcagcaaactatagcccgtgggccccatctggactgctgtttttgtatggcctgcaagctaagaatggtttttac

SEQ ID NO: 555958 - DNA, 201 bp, Homo sapiens
gcaagatctctggatctcttcacaaggcactaatcccatttagaggacttcacctttacaacccaattatttctcaaaggccccactccagatgccatcarattgggggttagaatttcaacatatcagcttttggggacataaacattcagtccatgacgataccagcagaaagagtacatctgagttgtaataacacca

SEQ ID NO: 555959 - DNA, 201 bp, Homo sapiens
gggaaaggtttcagaaagtatacagttgcagatggtactgctaatcccagatctcactttagctgtcccttctgagaaactttcccaactacatctgcccyctgcccaagaccaggtcagacgtccttcctgtgtgcttcatgcatcctgtgctcattcatcacatcattgtagcctgagagcctcttgaggacagggcaa

SEQ ID NO: 555960 - DNA, 201 bp, Homo sapiens
gttcaggttgctgtaacgaattaccatagactgagtggtttaaacaaacatttatttctcacagttctggaggctgggaaatcttaatatgaaggtgccakcagatcaggtatctggggagggcttgctttctgattgtatcctctcatggcaaagagcagagaggaagcaagatctctggatctcttcacaaggcactaa

SEQ ID NO: 555961 - DNA, 201 bp, Homo sapiens
tgagccctggctatctccctggggctgctgcaacagggcagctgggtgcctccccacaagagagggccaaggactggaggggaaacagtgtccccatacgrgccacaaaattgatgggcacgggaatttgatgttgtaaagaaatcaacaccgagacaaaggatctctcagcaaggctagtttactttctgcagaaagggt

SEQ ID NO: 555962 - DNA, 201 bp, Homo sapiens
tcccgcggttttaaaagtctccttgtcccctgcattgctgagaatccagatgtattcctcttactgggtgagccctggctatctccctggggctgctgcarcagggcagctgggtgcctccccacaagagagggccaaggactggaggggaaacagtgtccccatacgggccacaaaattgatgggcacgggaatttgatg

SEQ ID NO: 555963 - DNA, 201 bp, Homo sapiens
ggttaggggatgcaaagtgaggcagtagcagtagagcttgtgtgtcctgagccctgttttaaaggatactccctctcttgatccttccagtctttttatawcccagtcttgggagtgacttctatattgtctttcttagaagtgattcactgaatccagcccgcactcaaggggagcaggagctcacacaagggcctgcat

SEQ ID NO: 555964 - DNA, 201 bp, Homo sapiens
ctggtttcaactcctgtccagaccattctgcttcatatttttcttatgctctcacaccagtctttcttttgcccctctttctgattccaggggtatagttyacaaaaatttcactgtataatctgttctcaccatctgtttgtgtgcctaccattttgaaattatatcaggaattgaatgctgtaataaaactgtaaacat

SEQ ID NO: 555965 - DNA, 201 bp, Homo sapiens
tggtcacattatgaaaaccatttaatgttaattctagccactactttaggatggtttggaataggaaagaatttgagagaggttcaagatggggagatatrttgtgaagccgttgtagtttggcaagtcagtggggcctaaaataaggtgggagttagttgcactggttaatttgatagatactaaagtagtgtaaccata

SEQ ID NO: 555966 - DNA, 201 bp, Homo sapiens
ctagttataataatgctttggtgttattaaataagtggagaataaagtagtaaaacaaagtgctgttcagcgagtattgaataagtacatgtgacatgttwagcttgtgtgtggagtgaagtgtggacattttttagagaaagtagcatttgaaacgacctaatggaatgggtaaagcttctgaggacgtagttataacgg

SEQ ID NO: 555967 - DNA, 201 bp, Homo sapiens
aatcacagctgttcccccaatcccagcttgagaccttgatcaagtcactgtaacttattctaagcgctttatacatctgtgatgaaatatgggcttggctgggcatggtggctcacgcctgtaatctcagcactttgggaggcctaggcgggtggatcacctgaggtcaggagtttgagaccagactgggcaacatgtcaa

SEQ ID NO: 555968 - DNA, 201 bp, Homo sapiens
tccactcccctacccattcacactagtgtgcctgatttttggattacagagagaaggtgttatgtaatgtcttaaactggctccaccaaactttgtgaccrtgggttattctaagtctcacctccaagatgctggaatcataggtttgtgtgaggattaaataaagaaatccatgagaagtgcttagcatgtgtaccatgc

SEQ ID NO: 555969 - DNA, 201 bp, Homo sapiens
ccaatcccagcttgagaccttgatcaagtcactgtaacttattctaagcgctttatacatctgtgatgaaatatgggcttggctgggcatggtggctcacrcctgtaatctcagcactttgggaggcctaggcgggtggatcacctgaggtcaggagtttgagaccagactgggcaacatgtcaaaaccctgtctctacta

SEQ ID NO: 555970 - DNA, 201 bp, Homo sapiens
ctgggtggtggaggttgcagtgagccgagattgcaccactgcactctatcctgggcaacagagcaagactccgtctcaagaaaaaaacaaaaacaaaacawaacaaaaaaccaaaaagaagaaattagggattttccttaacacttctgtgatcactaggaggtctttctttctactgctctggtccctggcctggctgtc

SEQ ID NO: 555971 - DNA, 201 bp, Homo sapiens
gatttcagagggaaatggtgggaatggggaggctgtttgataatctaaaataaattcatgaccatttgagtagaaatgttttttcaggtgtaatggctgtrcataaactcagtagagtgccagcagcatttgagatgcaaccatatttttgagagcttttaagacagaatgctgaatattaggggagcattttatgtactg

SEQ ID NO: 555972 - DNA, 201 bp, Homo sapiens
agcctccccagtagctgagattacaggtgcgcaccaccacgcctggctaatttttttgtatttttagtagagacgggctttcaccgtgttagctaggatgktctgtaactcctgacctcgtgatccgcctacctcagcctcccaaagtgctaggattacaggcatgagccactgtgccagcctaggatgtttgattttaag

SEQ ID NO: 555973 - DNA, 201 bp, Homo sapiens
atctacatttaatggacatgctaggctgttgtgggagaaatgtggttagagatgaggaaaaatgatgtgactcagtgtaagtttatcaacgcataaaagayaggacttgttgatttgttacctctgtcaaaatttagagatggatttaaataatctcacttaactatattcattcatgcattacatacatcctgtgtttct

SEQ ID NO: 555974 - DNA, 201 bp, Homo sapiens
tgaagattctagctgaggttggagaaactgatctttcagagtcccttgggcaaacctttacagaaggcagctttagtgtaatatgatttggttaactacgwagtcctagggatttttttttcccgtgctttttttttccttaactttcttcttgtccgtgtcttactagttttatgtctacaaagataacacatttgtaag

SEQ ID NO: 555975 - DNA, 201 bp, Homo sapiens
gtgaagattctagctgaggttggagaaactgatctttcagagtcccttgggcaaacctttacagaaggcagctttagtgtaatatgatttggttaactacstagtcctagggatttttttttcccgtgctttttttttccttaactttcttcttgtccgtgtcttactagttttatgtctacaaagataacacatttgtaa

SEQ ID NO: 555976 - DNA, 201 bp, Homo sapiens
cccaggtacacaatacctggcactacccgcttcttgctgccacaggctgctgctttggattcctcctgctcctcctccacatctagtgtctggtctgtccyttccagcgcctttgctctgttgcggccttctccgattcctctgcctccgtgttgactgacacgagcagcacgacctaatttcattacttctaatgactgc

SEQ ID NO: 555977 - DNA, 201 bp, Homo sapiens
tccctcccacggctgctgctgccttctttttgcatctcacaaaccagtcctcagcctgaaagaacgcatctgacctcaccataggcactgagaaggttgcrgacatgtaggggctggaagtgtggtgggatatggcccaggtacacaatacctggcactacccgcttcttgctgccacaggctgctgctttggattcctcc

SEQ ID NO: 555978 - DNA, 201 bp, Homo sapiens
catttgggttgtctctacctcttggttattgtaaatagtgcttatgaacacgagcgtgcaaatatttccttgagaccctgctttcagttcttttggatctrtactcagaagtgggattgctggatcacacgattatttgtttttagttttttgaggagcagtcattctgttttctatagtagttggattgttctacaattc

SEQ ID NO: 555979 - DNA, 201 bp, Homo sapiens
ttaatgtgatgtattaaattgatttttgtttttgaatattcttgcattcctggaataaattccacttggtcatggtgtatagtcctttcagtgtgctattkaatttatttgttagtgttttgttcaagattttgcatcaatatttataagggatactggtctttagtctttatctggctttggtataagggtaatggtggt

SEQ ID NO: 555980 - DNA, 201 bp, Homo sapiens
ttttttttttttttttttttttaaagatttaaagaggtttattctgagccaaataagagcgaccaaggtctgtgacacagcctcaggagttcttgaaaacrtgtacccaaggtggttgggttacagcttgattttatacattttagggggacagaagttacaggcagacattaatctgtacatgtaaggtgtgcactagtt

SEQ ID NO: 555981 - DNA, 201 bp, Homo sapiens
ctggtcccgcggttttaaaagtctccttgtcccctgcattgctgagaatccagatgtattcctcttactgggtgagccctggctatctccctggggctgcygcaacagggcagctgggtgcctccccacaagagagggccaaggactggaggggaaacagtgtccccatacgggccacaaaattgatgggcacgggaattt

SEQ ID NO: 555982 - DNA, 201 bp, Homo sapiens
agaacatctttcccagagtgcctcagaccttattgctttaaaatataataatgttttcattacttttattatttgaatgatttagtaaagttgactgaatmtggtatagactttgggagtatgtgtgtgaagtttttatcaaactgtaatatttgtgaatggaatgccttgcaatatgaatgttaatataatgtgtaaagg

SEQ ID NO: 555983 - DNA, 201 bp, Homo sapiens
tctgttaatctggttagcacctaaggctcagatcaaattgatcctaaaatgtaaacgaattttcttttcaagtgtgaattttccgttaagtaaattgtacytagagatgagaggagaacttgccatattcaactttagttgtcttggtagttttgggttatattatttgtttgctttacattcgttttttttttgttttgt

SEQ ID NO: 555984 - DNA, 201 bp, Homo sapiens
taaaggatttttacaccctcaccttctcctgttctcctccccagaagtatgctagtgcaaaaagcctgcgtcttgattgcttttctctcctaggttttggragaaagttattcttgaggttcatgtttcagacaaaatcacttgatgcacttcatagctgaagcaggctcagttggcccccattttgaactgttttctgtc

SEQ ID NO: 555985 - DNA, 201 bp, Homo sapiens
atatattgttataaaaaggagtacatgatctttgcagaaatttaaaacagaagtgtgttaggtgaaaactatcataattctagcatcctaaaaccaaagcmttgtttggtttcttatctttccagatttttacatatgtactgtatacaggttaagaacatggatgctgtcttaagagggcctgcattcaaaacttggacc

SEQ ID NO: 555986 - DNA, 201 bp, Homo sapiens
aatagatattttgttgctggcatgatggtagtgtgtacagtcgtccctcgatatccatggatgattggttccaggacatcctcactccccatatagttacsaaaatccactgacgctcaagtcccttaaagtcaaccttccgtatcacagattgtgcgtcaacagatgcagaaccaggagatatggaggactgactgtatt

SEQ ID NO: 555987 - DNA, 201 bp, Homo sapiens
atactgacccatgggcaggttatcgatatactggtaaactcagaccacattatccactggtgagtaaataaggtaataaaaacaacattccaattttgaaktttccaaaaatgatactcgtaatttgttttccagtagtgaatcatataatcaggattgtgtttacaaaggaactcgaattttagctcttgagctcttacg

SEQ ID NO: 555988 - DNA, 201 bp, Homo sapiens
attataaaggatattgcagaggatacagatgaagagatgcatagggcaaggtattggggaagggatgccaagcttccatgagttcagtgttcagctagctmtttggaaactctctgaacccaatcctcttgggtttttatggaatcttcattccttcagggtatatggggtgggaccctctctggaatgagagtcttatga

SEQ ID NO: 555989 - DNA, 201 bp, Homo sapiens
tttcctgaagtaaaggtggaataatttgacaagtatcttgaatagccaaaattaaggtataaaagccgcatttaataaaagaactctaagtaatacttttycttccactcccctacccattcacactagtgtgcctgatttttggattacagagagaaggtgttatgtaatgtcttaaactggctccaccaaactttgtga

SEQ ID NO: 555990 - DNA, 201 bp, Homo sapiens
caaattgtgacacagagacatgaagtgaacatgcactgttggaaaaatgacattgttagacttgctcagagcagggttgccacaaatcttcaatttatttwtaaaaaaaaaagcatctggtcagatgtggtggctcatacctgtaattccagcaccttgggaggctgaagcaggcggatcatttgaggtcaggagttctag

SEQ ID NO: 555991 - DNA, 201 bp, Homo sapiens
ttatgaaagtaatttgtaaattctgtggtacttttcaaatgtatatcatttactgagtctgattatcacacggcctggcatataataagtactctataagwattggctgatttctaataggtctgaaaatttatcctttagaattttttcttcagttggtttagcgagtttccctttgatgttgaaaatgtttttttttaa

SEQ ID NO: 555992 - DNA, 201 bp, Homo sapiens
aaacttgaagctaacaaattttattagtgaagatttttagggcaatatttttaaaacttttttgagtatgactcagaaatggcttttataacgtgatcttygtatgtgtatataaataaagatttcatggcagcacttattcctactccgtataatacgagtataatactttgttatgccattttaatattttctgtccca

SEQ ID NO: 555993 - DNA, 201 bp, Homo sapiens
ttctaaagtaaaatcttcatatgtggtaatatttatatatatatttgttatagaggttgagtatcccttatctgaaatgctttggaccagaagtgttctgrattttgaatttttttggattttggaatatttgtattatacgtaactggttaagtgtctgtaatttcaaatttgaaattctaaatgctccaatgggcattt

SEQ ID NO: 555994 - DNA, 201 bp, Homo sapiens
caaatgtatatcatttactgagtctgattatcacacggcctggcatataataagtactctataagtattggctgatttctaataggtctgaaaatttatcytttagaattttttcttcagttggtttagcgagtttccctttgatgttgaaaatgtttttttttaaaaatctaacctagaccatcccaaatcatgaattac

SEQ ID NO: 555995 - DNA, 201 bp, Homo sapiens
ctcaaggcaatgaacagtccacataaatatttgtagtaagtatagggattaaaaataaataaataaagattgtctgcccatcaaagagagaccttaagacyttattagatgagtgtacacattatatgaattttaaaaaaaagagtgataagtagttaatataacatatggaaagcagatcacacgtgttctagtaaacaa

SEQ ID NO: 555996 - DNA, 201 bp, Homo sapiens
catcccaaatcatgaattactgttgtgtgaaacagtgagactactgtttttatgccacaggtttataattatgcaaataaatactacatctttgcattcawtttggttttacttaccgaattttcattccaggaatgtctgaatctgaacaggctcttaaaggtacttctcagattaaattactctcatctgaagatatag

SEQ ID NO: 555997 - DNA, 201 bp, Homo sapiens
ggggttttgccatgttgcccaggctggtctcaaactcctggactcaagcatctgcccaccttggcctcccaaagtcttgggattacaggcatgagccaccrtgcctggcttagatggcattttaatattgatggaattagactctttgttaataagatatcttaaaggaactacctatcaaatgaggaagcatgagcccaa

SEQ ID NO: 555998 - DNA, 201 bp, Homo sapiens
ctcagtgttgagcacctattggcagtcctgtgtgttgatgggccaagaatgactgggcgctgcagttctgtgcattccttgtaccttccaggttgcccctsttctacctgagttagctttggttgttagcagtaatgggtaaaaggatgatctgggaatctcttggtggtgatagaccagatgattggttagcatcctttg

SEQ ID NO: 555999 - DNA, 201 bp, Homo sapiens
ttaacatgttgagcattactcatgttagacctagtacacgtcctttagattctttaaaattcccaaattctatcttgttgtggcctgtgtgggacctgaamttaagaaacagtgtttgcttttgacagttgtaccatctgagtagaataactttaaaagtaggtggcattttgaattaatatgtattacaatcttctgtta

SEQ ID NO: 556000 - DNA, 201 bp, Homo sapiens
catcttgttggagttgttaacaaactgttaataaatgggcaaacagccttctggttaaatccttaccatatcaactttattaccagtgtgctacctgcaaycctccccagtctctccaaatcttgatgtcatcaacagaatagtgaacaggacagagttcttagacaaacatacagttatctctaataatgttgatccagt

SEQ ID NO: 556001 - DNA, 201 bp, Homo sapiens
agctgctccttagctattactgtcagccacactgatgtagctgagattcacattgccttttttgctccagctaatttatcctgtaaattcatgtcattagygtggctggtttaagacaacctgtcacagttgcctgaaagttgacaagggctttctgttctatatagcattgccatcctgatggatcaaagcttgatttaa

SEQ ID NO: 556002 - DNA, 201 bp, Homo sapiens
caattactggctgtttggcctctctgtgcctcatctgtaagttgaggcatggatgcataaaagtgtttcaaaaacttcctagcacaaagatagtaattactttttttttttctttttctattttgagacaaggtctctctcttttgcccaggccagagtacagtggcaggaacactgcagccttgacctcccgggttctag

SEQ ID NO: 556003 - DNA, 201 bp, Homo sapiens
agctatctgatctctggccttaaattcatcaggaaccccccttgcaacacctgtcgcatctaggtggatatgaggatcaaaggatctgtaaggagctcttstagtgtgttggtggtggggtgtttcctatttttgttgatgaaatgccagggtaaaagggatagccaattggactagagtgcaagtaccattccagttata

SEQ ID NO: 556004 - DNA, 201 bp, Homo sapiens
tctgtaaggagctcttctagtgtgttggtggtggggtgtttcctatttttgttgatgaaatgccagggtaaaagggatagccaattggactagagtgcaartaccattccagttatatggcagagtatccagtaagtgccccccgacattaccaccatatgtcccactcaaggatggctgatggaggcctcatgggttagc

SEQ ID NO: 556005 - DNA, 201 bp, Homo sapiens
agggtgttgtacttcaggatatagcagagagagagcttggcaagattcatcattccaggctgtagaatcttgaaagagagctaccacacactccaaatccrtcgcatgtgaagaacacttaagtggaaaggggacaatctgggcctctggcttaccgtgtgcacaagtgtaacagtcgcttttgtttagagtgtggacaga

SEQ ID NO: 556006 - DNA, 201 bp, Homo sapiens
ggaggagactactcctcatattgtcttatgcccaatttctgcctccaaagaaagaagtaaaaactaaaaggcagaaatgaaatctacaagcccacagcccrgcgccacgccctgggcctggtagttaaagatcaacccctgacctaactggttatgttatctacagattccagacattgtatggaaaagcatcgtaaaaat

SEQ ID NO: 556007 - DNA, 201 bp, Homo sapiens
aatttgagaatgcagaagttgtctttttcattaagttgctagatgctgtcatgttggaaaaacacttgaattttgaaatgaaaataagtatggtctttatrtttgcacattctcttgcagtggatatcactctttatcgcaatggttatcatggggacctgaatgagacattttttgttggagaagtggatgatggagcac

SEQ ID NO: 556008 - DNA, 201 bp, Homo sapiens
agttcgtatcttactcacataatagtccaaggcaggtgtgtttggtcactgtgggggcagggcagttactatgtgacacaggctgtgtcatctttgacctrtggctttcaaagtcactttgggagttgccctcctggtcagtagatagtggagatgttgggggttgaagcttgaaggggtatacctgggagtttttaacag

SEQ ID NO: 556009 - DNA, 201 bp, Homo sapiens
tgcactccagcctgggcaacagaataagactgtctcaaaaacaaacaaacaaacaaacaaaaaacaacaaaccaagaaaagcccctgttaattggggtctsctatctgctaatgtggcatttatctgggtcacaggctcaagcctttaaagagtggttaggatataaatgataagtgaaattgtaactttagcaacttccc

SEQ ID NO: 556010 - DNA, 201 bp, Homo sapiens
aataataataatcacagtaaacagacaacctgtagggagaaaatatttgcaaactatgcatctgacaaaggactaatacccagaatctacaaggaactcaracaaatcagcaagaaaaaaaaatcaaataatctcatcaaaaagtgggcaaatgacctaaatagaattttctcaaaagaagatatggccaacaaacatatg

SEQ ID NO: 556011 - DNA, 201 bp, Homo sapiens
acaagactcataggtgatgttatccacttcacatttcatcacatcaggaggcacagagtggctggtggttctgttcctagcagatcaccattgattgcacrggtacttttttttaacctcacaattggcatttaatctgtgggatgatattctggcacttggagagtatgcattttctcaacaatctttctctgagtggtt

SEQ ID NO: 556012 - DNA, 201 bp, Homo sapiens
tagctgggcgtggtggcacacgcctgtagtcccagctactcaggaggctgagacacaagaatcacttgaacctgggtggtggaggttgcagtgagccgagrttgcaccactgcactctatcctgggcaacagagcaagactccgtctcaagaaaaaaacaaaaacaaaacaaaacaaaaaaccaaaaagaagaaattaggg

SEQ ID NO: 556013 - DNA, 201 bp, Homo sapiens
cagtcttccttattgcctattaatttctaatatttattatttccttctgttagccttaggttttatcttttcttctttttctagttcttgaggtaaaagtygggttgttaatgtgagtttttttttttttttttcaagacagtgtctcgctctgtcacccaggctggagtgaggtggcacaatcttggcttactgcaacct

SEQ ID NO: 556014 - DNA, 201 bp, Homo sapiens
atcaatgaggaatgttattagttaatggtttggtcccacctccaaatttatcaagggctcttgatgggactcaaggtggaaaagaaagagcccctgactcmcgtattcttcctctctgaaggttggcatgagaggaggaatttcctctgtggcctttaggtcagggcattctctcttaaaatggcctgtttttccacattt

SEQ ID NO: 556015 - DNA, 201 bp, Homo sapiens
caatgaggaatgttattagttaatggtttggtcccacctccaaatttatcaagggctcttgatgggactcaaggtggaaaagaaagagcccctgactcccrtattcttcctctctgaaggttggcatgagaggaggaatttcctctgtggcctttaggtcagggcattctctcttaaaatggcctgtttttccacatttat

SEQ ID NO: 556016 - DNA, 201 bp, Homo sapiens
aaattgtgacacagagacatgaagtgaacatgcactgttggaaaaatgacattgttagacttgctcagagcagggttgccacaaatcttcaatttattttwaaaaaaaaaagcatctggtcagatgtggtggctcatacctgtaattccagcaccttgggaggctgaagcaggcggatcatttgaggtcaggagttctaga

SEQ ID NO: 556017 - DNA, 201 bp, Homo sapiens
aaaaaaaaaaaagagaaaagaaagaaggaagcagtatctgtgaagcataatatagtgaaatgcaataaaacaaggcatgcctgcatattacagtcattctktgagagactatagatcaggtacaaattttttaaaaagtacctaagagtgtctgcgatagtatagtcactcagataatgtgtatttgttgagtgaggtatg

SEQ ID NO: 556018 - DNA, 201 bp, Homo sapiens
gggcactaaccagtagttgcaaatgtttgttgttttcaattaggagctttggattgttttctttttcatgttcaaattgtctcaaatttgattagtgttawcacctttaaagtggcttctatatccttttgagtctcctccattactctctgattgcttcctagctctctggcatatgataaaacacattccctaatactt

SEQ ID NO: 556019 - DNA, 201 bp, Homo sapiens
tcatcaaaaagtgggcaaatgacctaaatagaattttctcaaaagaagatatggccaacaaacatatgaaaaaatgctcaatgtcactaatcatcagggaratgcaaattaaaaccacaatgagataccaccttactccagccagaatggccattactaaaaagtcaaagaacaatagatgttggcatggatgtgatgaaa

SEQ ID NO: 556020 - DNA, 201 bp, Homo sapiens
caatctagaaagtctaattctgtatgctctgaactattatttgtaatgctatgagaagtagagaagtatattcctaaatgagggaaaagccacaaatgtakttattggttgtaagattttttttttttttgtaattgaggaaacttcatattaatttagattttcagtaagaatggaattgctagtaaaatcatggtatat

SEQ ID NO: 556021 - DNA, 201 bp, Homo sapiens
aagctgcaaaatacagttaagagcaagtaaaaatgttaattaaactgattccttgagctatttaccctgaaatggatgggaaagatacattgtatctgaayctcagtctgggaatcagataggctgagtaggagagtagagagagttaaggatccccagagccatcttgaggttctctaggagtctgacagtgcccagctc

SEQ ID NO: 556022 - DNA, 201 bp, Homo sapiens
acctgcaaccctccccagtctctccaaatcttgatgtcatcaacagaatagtgaacaggacagagttcttagacaaacatacagttatctctaataatgtkgatccagtatttttattgtttttagtgcgttctttaatgtgtatgggagatgaaatttttactcaagttggaggaatggaaatgaaggaatatgatattt

SEQ ID NO: 556023 - DNA, 201 bp, Homo sapiens
gtattggctgatttctaataggtctgaaaatttatcctttagaattttttcttcagttggtttagcgagtttccctttgatgttgaaaatgtttttttttwaaaatctaacctagaccatcccaaatcatgaattactgttgtgtgaaacagtgagactactgtttttatgccacaggtttataattatgcaaataaatac

SEQ ID NO: 556024 - DNA, 201 bp, Homo sapiens
ttcataacagtagccaggaaggaacgaaagtggcttgatcttttttggaaagtgctttgaattcctttgtatatatcatttttgcccctcattttgcaccycccttactcccccaggtagagggtttgaaaagctgttgaaattaggcttcttaagtagggtttcttagtctatgcacttagtggcttttgggcctgataa

SEQ ID NO: 556025 - DNA, 201 bp, Homo sapiens
aataacaaagaaagtgtaagatagataatatcttacagaaacattttctgtagagagagaagaacatgttcaggaatgaatctgttatttaatgtcagaartgaaagctgtccacagtaagtgacctaggaaggaacttagcacatatattttgagccgctgctagatgaacactttcatctccttgtgcttaattttttt

SEQ ID NO: 556026 - DNA, 201 bp, Homo sapiens
ctgaggcacaagaatctcttgaacctgagaggtggagtttcagtgagctgagattgcgccactgcactccagcctgggcaacagaataagactgtctcaaaaacaaacaaacaaacaaacaaaaaacaacaaaccaagaaaagcccctgttaattggggtctgctatctgctaatgtggcatttatctgggtcacaggctc

SEQ ID NO: 556027 - DNA, 201 bp, Homo sapiens
tagagagagaagaacatgttcaggaatgaatctgttatttaatgtcagaaatgaaagctgtccacagtaagtgacctaggaaggaacttagcacatatatwttgagccgctgctagatgaacactttcatctccttgtgcttaatttttttcatctgtacaatagtagggaatggtacttactgtagaattgttatgagga

SEQ ID NO: 556028 - DNA, 201 bp, Homo sapiens
tgaggcacaagaatctcttgaacctgagaggtggagtttcagtgagctgagattgcgccactgcactccagcctgggcaacagaataagactgtctcaaaaacaaacaaacaaacaaacaaaaaacaacaaaccaagaaaagcccctgttaattggggtctgctatctgctaatgtggcatttatctgggtcacaggctca

SEQ ID NO: 556029 - DNA, 201 bp, Homo sapiens
agaaaataggtaactgacttcattccttccttttataccctgtaatcatctgaatatgcattccctttcacagaatggaagtagctattctagttacagtggggtgtgtgtatgtaagagtatgtgcaggggagggaatgaaaacagtccccttacttgcagaagcaataaaatttgagtttagatatggatttgagtgtg

SEQ ID NO: 556030 - DNA, 201 bp, Homo sapiens
gaggcacaagaatctcttgaacctgagaggtggagtttcagtgagctgagattgcgccactgcactccagcctgggcaacagaataagactgtctcaaaaacaaacaaacaaacaaacaaaaaacaacaaaccaagaaaagcccctgttaattggggtctgctatctgctaatgtggcatttatctgggtcacaggctcaa

SEQ ID NO: 556031 - DNA, 201 bp, Homo sapiens
aggcacaagaatctcttgaacctgagaggtggagtttcagtgagctgagattgcgccactgcactccagcctgggcaacagaataagactgtctcaaaaacaaacaaacaaacaaacaaaaaacaacaaaccaagaaaagcccctgttaattggggtctgctatctgctaatgtggcatttatctgggtcacaggctcaag

SEQ ID NO: 556032 - DNA, 201 bp, Homo sapiens
tcactactcccagaccttggcacccactgttctgctttctatctccatgattttgactactgtactctacctcatagaagtggaatcattaagcacatgctttttttttttttttttttttgagacggagtcttggtctgtcgcccaggctggaatgcagtggcgcgatctcagctcactgcaagctctgcctcccaggtt

SEQ ID NO: 556033 - DNA, 201 bp, Homo sapiens
tgggacttggctcggggaccacaatccaggattctgagggtgtcgacgctttcttgactcgagtgtgatgggtccaccccttctcggcagtgcgaactgcrgtttcgatggtcaataacatgaggtaggatccttcccaggctggctcgagccttccttccttccatccctttatgaagacgtggtctccaggctgatgcg

SEQ ID NO: 556034 - DNA, 201 bp, Homo sapiens
ccaggctgatgcgattgtactgggaattccaagggtggtgcttgtgctaaaagacctttggttttaagggaagaaaaagtagaggagagtccaaatatgtwatttctaaggaactgatctttggtttcaaaggtaggcacatcagctgaggaatgtaagtaaggcaatccatataacatttcatagggggatgaacctgta

SEQ ID NO: 556035 - DNA, 201 bp, Homo sapiens
aggacccatctaggaacaaatgttgtcttgttttataaggggtttcagataggtctggtcataccttggtatcataattaaatctagatacaaatgttctrtttgcagcaatggattccctcttaagaatccggcagggtcaagtgaactatcagtggttatagttagataatctctttctaataggatagcctcatactt

SEQ ID NO: 556036 - DNA, 201 bp, Homo sapiens
ctttgacctatggctttcaaagtcactttgggagttgccctcctggtcagtagatagtggagatgttgggggttgaagcttgaaggggtatacctgggagkttttaacagacagctggaattggcataaatcaaatttattttccattggcaggaattcagtcacatggctacatttaaatgcaagggagatgggaaaacg

SEQ ID NO: 556037 - DNA, 201 bp, Homo sapiens
agagctcttgggcgaccaggtgcattgtcagtgagcagtaatattttgaaacgaatctttttctctgagcagtaggtttcagcattaatattattaattayattaactatattatatgttaattatatattaatattattaaaatattcagtaaaccatgctataaattgaggtgctgtcatccaggctttgttgttctgt

SEQ ID NO: 556038 - DNA, 201 bp, Homo sapiens
ccccgccaccacgcccagctaattttttgtatttttagtagagacagggtttcaccatgttggccaggatggtctcgatctcctgacctcgtgatccaccmacctcggcctctcaaagtgctgagattacaggtgtgagccactgcgcccggccttgtttttatttttgagagagtcttgctcaatcgcccaggctggagt

SEQ ID NO: 556039 - DNA, 201 bp, Homo sapiens
tctcagctcacttcaacttctgtcttctgggttccagtgattccctgcttcagcctcttgagtagctaggatttcaggtgcacgccaccacacctggctartttttgtatttttagtagagacaggttccgccatgttggccaggctggtctcaaactcctgacctgcctcaggtgatccacctgcctcggcttcccaaag

SEQ ID NO: 556040 - DNA, 201 bp, Homo sapiens
ctcaaactcctgacctgcctcaggtgatccacctgcctcggcttcccaaagtgctgggattataggcatgagccaccgcacccagcttattttttaaaaartaggttaatgtgcatagattttgttcttctttgaagatgagaaaaacacaacagcttatgaaacattatgaaaatcatgtagtttctatgggctgtgcac

SEQ ID NO: 556041 - DNA, 201 bp, Homo sapiens
aatgtgcatagattttgttcttctttgaagatgagaaaaacacaacagcttatgaaacattatgaaaatcatgtagtttctatgggctgtgcacctgtgtrcaaacacatgcttaccccccaaagcggtgggaaatttctggcataatctgaaacatctgtcattctcctttgagcttctctacccggatgagtagtggaa

SEQ ID NO: 556042 - DNA, 201 bp, Homo sapiens
gggaaaatttcccctttgccctttgaaggttcactgaaaaatcaacttacaaaaaccagattaataggagaaatggtatacaaatttattagtgtgcatgrggaagaatcacagaatgattgtctaataacccactggggtacagatgcttattaccctacttcttaggggaaaaggagatggggaaatgtggatgttttt

SEQ ID NO: 556043 - DNA, 201 bp, Homo sapiens
gctaccacacccagccttatatattatgtttatgaagagtcacatttatgtaaaacaaaatatgcaatgatcactgtagggaagtattaaactattgaggktttttttttttgtatagcagagatatcttttgaaatgtaaatctctgctttagtttgtaactctatattcctagcccaaatgagggaagaaccaggaaat

SEQ ID NO: 556044 - DNA, 201 bp, Homo sapiens
agccagcacaggtaattaatcatcaaattatagcagatatacttgaagtgtaactcagctaggttaaatccctggactagaaagtctcaaatctgcaggakaatttcctcagaatagccaaataagtttgacttgacattactaaaaatcctgttttatcagatcacaataaaattacagtagtaatgttttaaatttgtg

SEQ ID NO: 556045 - DNA, 201 bp, Homo sapiens
aacattatgaaaatcatgtagtttctatgggctgtgcacctgtgtacaaacacatgcttaccccccaaagcggtgggaaatttctggcataatctgaaacrtctgtcattctcctttgagcttctctacccggatgagtagtggaactcttggttctgtgattgcaattctaatcatgaggtaatagaaatcaaggcactt

SEQ ID NO: 556046 - DNA, 201 bp, Homo sapiens
catcatgaaatactccccagccattaaaaaaagaatgaaataatatcttttgcagcaacgtggaaggaaccagaggctgttattctaagtgaagtaactcyggaatggaaaaccaagtaccaggtcgtctcgcttacaagtaggagctaagctgtgggtactcaaagacattcggagtggtataatggactttggagactc

SEQ ID NO: 556047 - DNA, 201 bp, Homo sapiens
gcacatgtaagattaatttcattacttctttcttttatgaaaatatttttattttctataaatacatttggaagaaattatttcttcccaacccagtccaycccattaactgtcagttttttctactaaaaaagatgctaataccaccctcacctgtgactgctaaacagaaaaatattgcctggactaggcattattccc

SEQ ID NO: 556048 - DNA, 201 bp, Homo sapiens
ccaacactataacgagactgcaacaaggctaggggagttattagccaaggaactgtggacagatacacacacacacacacacacacacacacacacacacaacacacacacacacacacacacacacacaaaataacacagcaaatcatccacgggatctaaagaagcatgatacagtaaatgcctatatacctaccatct

SEQ ID NO: 556049 - DNA, 201 bp, Homo sapiens
ctgttgcagggaatgagaatttcataatacactgctatttcagacctctgtttggtcagaaatggaaaagaaaaagccccctttcttcccttttctgtttyacttcaagggcataccttggaggtgctcagagaagcgtgaagtttgcactatggtggaggatggggaaagagttctaaagtgtctccagctgtgaaccca

SEQ ID NO: 556050 - DNA, 201 bp, Homo sapiens
gattctagctgaggttggagaaactgatctttcagagtcccttgggcaaacctttacagaaggcagctttagtgtaatatgatttggttaactacgtagtcctagggatttttttttcccgtgctttttttttccttaactttcttcttgtccgtgtcttactagttttatgtctacaaagataacacatttgtaagactt

SEQ ID NO: 556051 - DNA, 201 bp, Homo sapiens
taaaacagaagtgtgttaggtgaaaactatcataattctagcatcctaaaaccaaagcattgtttggtttcttatctttccagatttttacatatgtactrtatacaggttaagaacatggatgctgtcttaagagggcctgcattcaaaacttggacctgtcattaattacccctgtgttttttggacatgttaatctgt

SEQ ID NO: 556052 - DNA, 201 bp, Homo sapiens
agattctagctgaggttggagaaactgatctttcagagtcccttgggcaaacctttacagaaggcagctttagtgtaatatgatttggttaactacgtagwcctagggatttttttttcccgtgctttttttttccttaactttcttcttgtccgtgtcttactagttttatgtctacaaagataacacatttgtaagact

SEQ ID NO: 556053 - DNA, 201 bp, Homo sapiens
aagattctagctgaggttggagaaactgatctttcagagtcccttgggcaaacctttacagaaggcagctttagtgtaatatgatttggttaactacgtartcctagggatttttttttcccgtgctttttttttccttaactttcttcttgtccgtgtcttactagttttatgtctacaaagataacacatttgtaagac

SEQ ID NO: 556054 - DNA, 201 bp, Homo sapiens
gtcgtctcgcttacaagtaggagctaagctgtgggtactcaaagacattcggagtggtataatggactttggagactcagaaagggggagggctggctgarggtgagggataagaaactacatatttagtacaatgtacatactaggatgactgcactaaaatctcagactttagcattaaacaaaaaacaaaaatggtgg

SEQ ID NO: 556055 - DNA, 201 bp, Homo sapiens
gtgtattttgtctgtgtaatccttcatctcctaatgaccttgtgcagtgtaggtacttttttatgcccatttcatagatgagcaaatggaggctcagaggrcttaagtaactcaaggacacttaaggtagtcaccatggaaataagtagtgaagtcaagagtaaagcaagatgcttctgggcatcagagcctaccttcttc

SEQ ID NO: 556056 - DNA, 201 bp, Homo sapiens
ttaaattgagacggagtttcgctcttgttgcccaggctggagtgcaatggcacgatcttgactcactgctgcctcagcccagtatctgggattataggcaygcaccaccatacccggctaactttttatatttttagtagagacggggtttctccatgttagtcaggctggtctctcaagctcccaaccttaggtgatcgg

SEQ ID NO: 556057 - DNA, 201 bp, Homo sapiens
actgcttgaacctgggaaatgaaagttgcagtgagccgaggtcacgccactgcactccaggctgggcaacagagtgagactgtctccaaaaaaaaaaaaaraaagtaagatgggtttgtcaggataattacattctgtcaatttactaatggaaaaagttgtggctccaagttaaaaacaaaacttgtaggcatgaagtta

SEQ ID NO: 556058 - DNA, 201 bp, Homo sapiens
ttttttaaaaactcatttcatcaaacaataccacctctttgagaatctcacagtgggtcatgagccctatgagaacttttcctgtaagttcttacctagggtctggttgtaataatccagtgaatgttgaaaacaaactccagtgaatgttttattcctccagagcataacttaccatttcctcacaaatctgccctagtc

SEQ ID NO: 556059 - DNA, 201 bp, Homo sapiens
gagcccaggaggtagagactacagtgagctgtgatcgtgccactactctccagcctgtgcaacagagcaagaccccatctcaaaaaaaaaaaaaaaaaaaagacccccctccactatagaaaatatgaagttcccacgaagggaaccataatcctccccacatcccattggtattctagctttattaaggcttttttcctt

SEQ ID NO: 556060 - DNA, 201 bp, Homo sapiens
ctctgcctcccaggttaaagcgattgtcttgcctcagcttcctgagtagctgggattacacatacacgttccaccgtgcccagctaatttttttttcccccaccgagacagagtcttgctctgtcacccaggctggagtgcagtggcgcgatctcggctcactgcaacctctgcctcccgggttcaagcgattgtcgcgcc

SEQ ID NO: 556061 - DNA, 201 bp, Homo sapiens
ccagctactcgggaggctgaggcaggagaatggcatgaactcgggaggcggagcctgcagtgagctgagatcgcactactgcactccagcctgggcgacartgcgagattccgtctcaaaaaaaaaaaaaaagacttgaacccaggagtcctcaccagggtcttgtcctctaccagtggttttttgcactgtactttgagg

SEQ ID NO: 556062 - DNA, 201 bp, Homo sapiens
cttgaacccaggaggtggaggttgtagtgggccaagattgtgccactgcacttcatcctgggctacagagtgagattccatgtaaaaaaaaaaaaaaaaaatccccttgtaagttgtcatctaatgcattgaaaattggtaagattaggcagaggttttatctaacactaaagtttccttgccttgatgagctttcagtgt

SEQ ID NO: 556063 - DNA, 201 bp, Homo sapiens
tggtggcacactgggcaggaccctgcttcatctcgggttggtttatgggcttttactttggagcactctgtgtgaagctgtttggtggaacccatgcatcyggtgtggtccgcattatgatggaaggatcttaaccagtcgagtggagtgtacattgtctgaatacaggatgcacaatgttgtcaatcctggaaatggtct

SEQ ID NO: 556064 - DNA, 201 bp, Homo sapiens
aaaggaatatcttcattcttaggaaataggcactgcagtatttaggagtaaggcatcatgacttatgcaatttactctctagtcaaaaaaaaaaaaaaaaagctcgctcatatgtggaagccaaaaaaacttggcttcgtggagatagagaatagaatgatagataccagagtctgggaaaggtgtgtgggtgggatggca

SEQ ID NO: 556065 - DNA, 201 bp, Homo sapiens
agtggtgcgatcgctgcagccttgacctcaagtgaccctcccaccgcagcctcctgagtagcggggaccacacttggtgaattttttttttttttttttttaaacggagtctcgctctgtcacccaggctggagtgcagtggcgcgaactcagatcactgcaacctcagcctccctacaggtagctgggattacaggcgtc

SEQ ID NO: 556066 - DNA, 201 bp, Homo sapiens
aactctaagaggaaagattatattgaacaaaacattaactttgaataacctctcaatttcaaattctctttttttgtttttttttttttttttttttttttggagacagaggtcttgttctgttgccgaggctggagaatctcagcttactgcaacttccacctcctgaattcaaccaatttctcctgcttcggcctctca

SEQ ID NO: 556067 - DNA, 201 bp, Homo sapiens
taactctaagaggaaagattatattgaacaaaacattaactttgaataacctctcaatttcaaattctctttttttgtttttttttttttttttttttttttggagacagaggtcttgttctgttgccgaggctggagaatctcagcttactgcaacttccacctcctgaattcaaccaatttctcctgcttcggcctctc

SEQ ID NO: 556068 - DNA, 201 bp, Homo sapiens
ggtttctccatgttaggctggtctcaaacttctgacctcaggtgatctgcccgtctcaccctcccaaagtgctgggattacaggcgtgagccaccacgccygcccaggaatatttcccttttaatcccccttccataaatgtgacttatgtgaaattctacataatgtcagaaggtccatcagaatgcatagttgtttctg

SEQ ID NO: 556069 - DNA, 201 bp, Homo sapiens
tacttctagtcaataactttttgttataccaaacttggtaaattaagaattgtattgttttgaagttttctggtagaattataagtgaaagagggatttcragaggtaataagatgggtttcaactacctaggaatgaaactaaaattaaaagatgacctggtcagagtcacatagtcagaaagcagaattaagacttgaa

SEQ ID NO: 556070 - DNA, 201 bp, Homo sapiens
ggattacaggcacccactaccacgcacagctaatgtttttgtatttatggtacctatggtactatagtgcctatagtcccaagtactcaggaggccaaagygagaggtttgcttgagcccaggagcttgaggatgcagtgaattatgattgtgtcactgcactccagcctgagcaacagagatcctatctcaaaaaaaaaa

SEQ ID NO: 556071 - DNA, 201 bp, Homo sapiens
tggttaacaagtgtattgtatatttcaaaacagctagaagggaggactttaaatgtctccaaaacataggaaggataaatacttgaggtaattgacacccragatatcctgacttgatcattacacagtttatacatgtaacaaaatatcacatataccccataagtgtatacaaatgtctgtatcaatttttttaaaatt

SEQ ID NO: 556072 - DNA, 201 bp, Homo sapiens
ggatttcatggcagagcctggagtagaatccaggggtcttggttcatcccattagctaactacagaatgtctctaggttgcccttgctatgtatttaaaayaaataaaaacaaataaaaacattaaaaactaagatgtcagatgccttaaatgttagcatctggcagtttcactttgtctccccatcctaaaaacaactga

SEQ ID NO: 556073 - DNA, 201 bp, Homo sapiens
ttccagatccacgagagcgtgtgaaagaagatgacttagatgttgttctcagccctcagagacggagctttggagggggctgccacgtgacagccgctgtyagctcccggcgctcaggaagtccattagagaaagatagtgatgggcttcgtctgcttggtggacgtaggattggcagtgggaggataatctctgcccgga

SEQ ID NO: 556074 - DNA, 201 bp, Homo sapiens
acctcaggtgatccacctgtcttggcctcccaaagtgttgggattacaggcatgagccatagtgtccggactgatctgctttctgtatctgctttctgttyctatagattagtttacatttcctaggattttatataaatggagttactatagtatatactccttgtatagcttttttcattaagaatagttacgatttat

SEQ ID NO: 556075 - DNA, 201 bp, Homo sapiens
ttccagcctttctgcaaataaagaaaaacttaaagaaagctgtaagtgtttatgaatatctgttttagatatctgaaaaggtctagatgttcagtcttcargcagttgggtctaacataacctctgtttcataaaaagtcaaatatatattgggtttttgtttaatgttcttttttaaaaactcatttcatcaaacaatac

SEQ ID NO: 556076 - DNA, 201 bp, Homo sapiens
agaaatgggtcgcgtaaacttcggtgtatccatatatgggaatgttacattgcattgtcctgtaaaaccatgttgcagatgtgtttattggcaaataatgktcatgacgtactgactcatagaaaactctccatattgtatcctgtgtttggaaaaaacagactgcacagaaattctgtaaaagtacacaacagaacattc

SEQ ID NO: 556077 - DNA, 201 bp, Homo sapiens
agcagaatcattaaagatatgcagagactttattaaaatgatgaaaactgagaaggaacctaaatatccaacagtagaaatgggtcgcgtaaacttcggtrtatccatatatgggaatgttacattgcattgtcctgtaaaaccatgttgcagatgtgtttattggcaaataatgttcatgacgtactgactcatagaaaa

SEQ ID NO: 556078 - DNA, 201 bp, Homo sapiens
aagggactatattttctagaaatgtcactatcataagagacaaaagttgtagaaatgttctagattaagggagaccaaagagatacaacaatcaaatatckgattctagactggatcctgttttggagggggaagatcaatataaaggacattactgggtcaatttacaaaactggaattgggaaggtagattagaaaaaa

SEQ ID NO: 556079 - DNA, 201 bp, Homo sapiens
ataactctaagaggaaagattatattgaacaaaacattaactttgaataacctctcaatttcaaattctctttttttgtttttttttttttttttttttttttggagacagaggtcttgttctgttgccgaggctggagaatctcagcttactgcaacttccacctcctgaattcaaccaatttctcctgcttcggcctct

SEQ ID NO: 556080 - DNA, 201 bp, Homo sapiens
ccctgactgaaagtggtgctacaggtgcatgggcagaagcagagctaaattaatttggttccatttttaagcagtaagagacttgcaaagactatcctttwaaaaaaaaatcactagaaaaagaactaggcatggtgctggacacagtggctcactactgtaatcctagcactttgggaggccaaggcaggaggatcactt

SEQ ID NO: 556081 - DNA, 201 bp, Homo sapiens
aataactctaagaggaaagattatattgaacaaaacattaactttgaataacctctcaatttcaaattctctttttttgtttttttttttttttttttttttttggagacagaggtcttgttctgttgccgaggctggagaatctcagcttactgcaacttccacctcctgaattcaaccaatttctcctgcttcggcctc

SEQ ID NO: 556082 - DNA, 201 bp, Homo sapiens
ttggtgtttatcactctgtgattagagcaataactctaagaggaaagattatattgaacaaaacattaactttgaataacctctcaatttcaaattctctytttttgtttttttttttttttttttttttttggagacagaggtcttgttctgttgccgaggctggagaatctcagcttactgcaacttccacctcctgaa

SEQ ID NO: 556083 - DNA, 201 bp, Homo sapiens
tacaacctctgtctcctgggttcaggcagttcttgtgcctcagcctcctgaatagtacctgggatttcaggtgtccaccaccaggcccagctagtttttttatttttagtagagacgtggtttcaccatgttggccaggctgctcatgaactcctgactcaagtgatagctggtctcggcctcccaatgttttgagattac

SEQ ID NO: 556084 - DNA, 201 bp, Homo sapiens
tcgatctcgtgacctcgtgatccgcccgccttggcctcccaaagtgctgggattacaggtgtgagccactgcactcagcatttttttttttttttttttttgagacagagtcttgctctgtcacccatgctgtagtgctgtggcatgatctcggctcactacaacctctgtctcctgggttcaggcagttcttgtgcctca

SEQ ID NO: 556085 - DNA, 201 bp, Homo sapiens
aagtcattgggaggacaaggtgggaggatgaattgagtccaggagttcacgaccagactgggcaatatagtgagaccccatctcgttaaaaaaaaaaaaaattgccagaggtggtggtgtgcacctgtggtcccagatactcaagaggctaacgtgggaggatcacttgagcttgggaagttgagcttgcagtgagctatg

SEQ ID NO: 556086 - DNA, 201 bp, Homo sapiens
attcagcttgatactgaccagtgttaaacatgcgtattaaagttaagtgaatgttgaattatcttagtttaacttcatgtggaatttttttttttttttttgagacaggctctcactgttatccaggctggagtgcagtggtacagttaactcactgcagcctcgaactctgcattcatgcgatccttccacctcagcctc

SEQ ID NO: 556087 - DNA, 201 bp, Homo sapiens
ggcggaaccccgagttacgccgcccgcggccgagcactaaagatgaggttccagctgggaggcggctgcgtacgaaagtcctccctccctcacttccggastcgtgcgtgggcctctctggcttttggttcacagggagtggaaaccggaacccgtggagtatgacccgcccatgcgtggacccggcaggttgctacaact

SEQ ID NO: 556088 - DNA, 201 bp, Homo sapiens
gctctgattacaggcgtgagccaccacgcctggcctcacatccatgttattttcgtcaagtgaatagactaatctgtttttttttgtttgtttttgagacygcgtctcactctgtcacccaggctggagtgcagtgttgcaatcttggctcactgcaacctctgcttcccaggttcaagcaattctcctgcctcagcctcc

SEQ ID NO: 556089 - DNA, 201 bp, Homo sapiens
aagcgattctcctgcctcagcctcccaagtagctgggactacaggtgcacgctgccacacccagctaattttgtttttgtatttttatttttatttatttwttttttttgagacggagtttcgctcttgtcgccgaggctggagtgcaatggtgctatctcggctcactgcagtctccgcctccggggttcaagtgattct

SEQ ID NO: 556090 - DNA, 201 bp, Homo sapiens
caacttaaattcatttcctaaaatgctgacaggtgaattctgaatggagaaaagccatcaaatgaagggaaaagaaaatcttccagtacttttttttttttgagatggagttttactcttgttgcccaggctggagtgcaatggcaccacctctgcctcctaagttcaagtgattctcctgcctcagcctcctgagtagct

SEQ ID NO: 556091 - DNA, 201 bp, Homo sapiens
gatctgttttggtatgacagcatgtaagttgatagaaaactttttccacattcagatttggtcttcccaaatatattttctctcaaacctgagagtgtttkagtagtgtttcacaacttaaattcatttcctaaaatgctgacaggtgaattctgaatggagaaaagccatcaaatgaagggaaaagaaaatcttccagta

SEQ ID NO: 556092 - DNA, 201 bp, Homo sapiens
ctgttgtacatactgtggtatgttcagtatgtggtagaaattccatcccaatccaaatcaatagaagaaatagatttaatagcggaaatatgattaaattstactgcaaggcatagggctttcattctatatggttttatttccgttcttgatttataaattactttttttccttgagtttgctaattagccatatggaag

SEQ ID NO: 556093 - DNA, 201 bp, Homo sapiens
ttctacagaatacagtacagttctgagtcccctttcctaactggaggtttttcagtcctgctatgaggtgatacttatttcccatgctactcaagttaatytaccagagttctagatatttgtccattcaggaccattttaggactccatgctaaagggtcagataatgaggtaaaggtcaaggtggttggatttttgact

SEQ ID NO: 556094 - DNA, 201 bp, Homo sapiens
taagtaagttaagtttttcttgaaaacccatggaaattgggcactgtggctcacgcctgtaatctcagcactctgggaggcagaggcaggcgaatcacaargtcaagagatcaagaccatcctagccaagatggtgaaatcccatctctactaaaaatacaaaactagctgggcatggtggcccacacttgtagtcccagc

SEQ ID NO: 556095 - DNA, 201 bp, Homo sapiens
acttgttctaagtttgggacaaagtgtaaccagataataagatgaagtaaattgacctctatgcaatttgggattactgttcctgcaaagtcagtgggaaragccaagtgttttctggctttttcctttgcctgttaggagagagggctgagaatccaacagaggttcagcatccggcctgcccagggtatataccccctc

SEQ ID NO: 556096 - DNA, 201 bp, Homo sapiens
aatgagatttattagaccagtgggaggccacaagtgtttgggagaggtttgccaaaatattttttgtttggttcctcacagaaaacctcctgtcatccagytctgtacccagtgccgatcgagactcttctcccactacaaattccaaactgtcagcattacagaggtcttcgtgttccaccccactgtcccaggccaacc

SEQ ID NO: 556097 - DNA, 201 bp, Homo sapiens
ctagccttcatgttttggatcagcatcagcctcttaggtcctccctgtgtacagttgtgtccctccaacaaacatgcctttccccttaccttgcttttttwaattgtattcatcactgtctagcatattatttattgtttgtctccctgcctgtagtaaccccactccatcctgcagccccaagaatgtaacctccatgag

SEQ ID NO: 556098 - DNA, 201 bp, Homo sapiens
agagttactattatacagtgtgacaagtactcagagatgacataaggattatagagaaggtagcaattaattttactaggtagggcaaaaatgggtaggcrgggcaagcttcccagagaaggtcacatttgaatttcgccttgaaggatgagctacaacaaccaacctgtaggcaagtgaaaattgccctcatgccaggtt

SEQ ID NO: 556099 - DNA, 201 bp, Homo sapiens
caagcagttctcatgcctcagcctcccgagtagctaggattacaggagtgtgccaccacacccggctagttttttgtatttttagtagagatggggtttcrctatgttggccagacttgaattcctggcctcaagtgattcacctgcttcggtccccaaagtgctgggattacaggcatgagccaccgcacctggcccaga

SEQ ID NO: 556100 - DNA, 201 bp, Homo sapiens
tgtccagcctttaaaagtaatcactaccttaattaaaaataatttatcaccaaaatgcacatccctgaacactatagtttagtctacctttaaaatactcrgtacttaatgttttgatgtgattcttaaagttactaccacagtgcctcagtgttttgcttcagctggttttacctgttaaccctttcagaagatactgag

SEQ ID NO: 556101 - DNA, 201 bp, Homo sapiens
gtatctaatttttttcagcttctgcttaacatacctttctaagagtgaagagaaacctttgtagaaagtgtggtgtccttactcttctcctgaccctcccstctccttttcagcagatgagccagctggagttgcaacaggcagctttagaagggctggccttgccacatgaccttgctgtacaggcagcaaacttctacc

SEQ ID NO: 556102 - DNA, 201 bp, Homo sapiens
tggagtgcagtgttgcaatcttggctcactgcaacctctgcttcccaggttcaagcaattctcctgcctcagcctcctgagtagctgggattacaggcacrtgccatgatgcccagctaatttttgtatttttattagaaacggggtttcaccatattggtaaggttggtctcaaactcctgacctcaagtgatccacctg

SEQ ID NO: 556103 - DNA, 201 bp, Homo sapiens
ttttgtttgtttttgagaccgcgtctcactctgtcacccaggctggagtgcagtgttgcaatcttggctcactgcaacctctgcttcccaggttcaagcarttctcctgcctcagcctcctgagtagctgggattacaggcacgtgccatgatgcccagctaatttttgtatttttattagaaacggggtttcaccatatt

SEQ ID NO: 556104 - DNA, 201 bp, Homo sapiens
ttgaggtccacatagcccactgttggggcacagagggagagggacatctgtcagcccaataaatcagtgctttccaagagatggcgttcagcaagaaatgkcatgcattaatgaaaatgcctccctgatgcacacataccatcttggtactcactgagactaactttcccgacaggtttcacaccaggaccacagcagcta

SEQ ID NO: 556105 - DNA, 201 bp, Homo sapiens
caccgagcctggccccttccagtacttttatttttatttttttgagatggagtttcactcctgctgctcaggctggagtgcaatggcacgatcttggctcrctgcaacctccgcttcccgggttcaagcaattctcctgcctcagcctcctgagtaggtgggattacaggcatgcaccaccatgcctggctaattttgtat

SEQ ID NO: 556106 - DNA, 201 bp, Homo sapiens
tgttttctggctttttcctttgcctgttaggagagagggctgagaatccaacagaggttcagcatccggcctgcccagggtatataccccctcaccagttmatgttgctgcttctgtgatgtggttacttagccatgagaagtagcggtcatgtcatccagggtgggttttcaatactggtagcttctgaatagctcagct

SEQ ID NO: 556107 - DNA, 201 bp, Homo sapiens
tagagacggtttcactgtgttgctggtgttgaactcctgagctcaggtgatccacccacctaggcctcccaaagtgctgggattataggtgtgagccaccragcctggccccttccagtacttttatttttatttttttgagatggagtttcactcctgctgctcaggctggagtgcaatggcacgatcttggctcgctgc

SEQ ID NO: 556108 - DNA, 201 bp, Homo sapiens
tgcatgctaaatgcaaatgggaaagcagtaactaaatagtagagaaactagagaataccttgaccaaatgatccaaattagcaccatagataaaggacagwtgaacatcatggcctccagaagtgacggtctgtgaaggacacagcacctcttcagttagtattctgccccatggatatttaggctcagtctatcatgaga

SEQ ID NO: 556109 - DNA, 201 bp, Homo sapiens
aagcagttgggaccactgatgacaagaagggttatatcctagttgggcacacatccatatatttccttagtatggatttttctttttttttttttttttttgcacccgacagggcgtcactttgtcgccgaggctggaatgcagtggtgcaatcatggctcactgcagcctggacctcccgggctcaagccatcctcccat

SEQ ID NO: 556110 - DNA, 201 bp, Homo sapiens
ggccggcgggtagccggcgggctggctggcggggaccgagccgccgggccggggaggacggctgcgggcctgcgctagctccagcttgaagcgcccgggcmgggagattcggcctccctcctccctgcggccggccgcccctcagtgagtacggtccccgcccttcctccgaaggaggccgctgggcccgggcctgcgtga

SEQ ID NO: 556111 - DNA, 201 bp, Homo sapiens
ctgcgcgcacgggagcgggtttccgctatccccaccgtggcctcctcctcgccgccaccaccttcccaccccccggcccgcgcaggggctggcgtccgggragcgcgcggcgatgcttctttttcgcccggcaccgctgcagccacctcacatccgggcgcgcggcggggaaggcggcgccggggccagggtgcgtggagg

SEQ ID NO: 556112 - DNA, 201 bp, Homo sapiens
tacatgtgaacggtctttccatccccagatctttgagacctgtgtgatgagagcggaacacgttggtctaagttttctgtgacttgagtatcattctgctrttaactccctaggagtattttatgctttcttgtggtccccaatcaatctgtaagttaagtgagttaagaaagttaaaaccagttttcttttgactctttt

SEQ ID NO: 556113 - DNA, 201 bp, Homo sapiens
ggaccacaggcgtgcaccagtacgctcggctaatttttgtattttttatagagatgggaattcgccatgttgcccaggcaaactcctgggcttaagcaatycgcccaccttggcctcccaaagtgttgggattacaggggtgagccactgtgccaggcctcagtcattgactctgacatggcttattgtccctggcttcct

SEQ ID NO: 556114 - DNA, 201 bp, Homo sapiens
gacggctgcgggcctgcgctagctccagcttgaagcgcccgggccgggagattcggcctccctcctccctgcggccggccgcccctcagtgagtacggtcyccgcccttcctccgaaggaggccgctgggcccgggcctgcgtgaggggctgcgggttggggtcgcggcccggggaagccaagtttcggagctgaagccgg

SEQ ID NO: 556115 - DNA, 201 bp, Homo sapiens
tggttcatccaaaaataatacatgctggttcaatctaaattctgttttaaattatagattctatcctccaagtataataagccatgcagtataaagttgtmtatttgtttttattagatggaagtaaatgactcttaaagagattacttataaaatcatctgcctttagtcccagttccaaaatcaacaataaaatacttg

SEQ ID NO: 556116 - DNA, 201 bp, Homo sapiens
tctctcccagagagaggtcttggctttaaaaggagcaatgctgatggcttagttgagaagcaatttggacagtgctctggttgaggtccacatagcccackgttggggcacagagggagagggacatctgtcagcccaataaatcagtgctttccaagagatggcgttcagcaagaaatggcatgcattaatgaaaatgcc

SEQ ID NO: 556117 - DNA, 201 bp, Homo sapiens
gcaagaccccatctcaaaaaaaaaaaaaaaaaaaagacccccctccactatagaaaatatgaagttcccacgaagggaaccataatcctccccacatcccrttggtattctagctttattaaggcttttttccttttctgcctcccgtagaagggggactgttttattcttgcaagtacagtacctgcacgagaagtctgc

SEQ ID NO: 556118 - DNA, 201 bp, Homo sapiens
ccgaggtgggcagatcacctgaggtcagaagtttgagaccagcctggccaacgtggtgaaaccccatctctactaaaaatacaaaaatagccagacgtggyggtgcatgcctgtaatcccagctacgcaggaggctgagacaggagaatcgcttgaatctgagaggcggaggttgcagtgagccaagatcacgccactgta

SEQ ID NO: 556119 - DNA, 201 bp, Homo sapiens
ttacatttgtgtcttggtgattgggtgctgactgcaatggtgtggttcatatcttataattagcttctttcttttggtgtgagcaactaaaaatatggaakggggcattcagcagtttacctgatgtttttccacattttattgcagatatgattctaggatttgatattaacacaatttactcgagttgtaagggcagtt

SEQ ID NO: 556120 - DNA, 201 bp, Homo sapiens
taaaaccagttttcttttgactcttttagcgaaaccttgaaagccatttgatgtcccctgctgagattccaggccagcctgtccctaagaacatcctgcakgtacttcacaatcttatactgaggccttggagtcttgaacagtagtcttctgaaccagttttgcttagtggtccaactttgggccttagaaaatgatctg

SEQ ID NO: 556121 - DNA, 201 bp, Homo sapiens
caaatgctttcaaatgaagatcagactgaaagatggtagactatcctattttcctttctcgttacatttgtgtcttggtgattgggtgctgactgcaatgstgtggttcatatcttataattagcttctttcttttggtgtgagcaactaaaaatatggaagggggcattcagcagtttacctgatgtttttccacatttt

SEQ ID NO: 556122 - DNA, 201 bp, Homo sapiens
catgttggtcaggctagtctcgaactcccaacctcaggtgatctgcccgccttggcctcccaaagtgctgggatcacaggcgtgagccactgcgcccagcygttccagtacttatttttttgtttctttgagacggagtctcgctctatcaccagagtgcaatggtgcgatcttgattcactagcctctgcctcctgggtt

SEQ ID NO: 556123 - DNA, 201 bp, Homo sapiens
atatggactcaaaaaagtaaggcttcagtcatatttcccctagctaaaaactggagatgcttaaactgcttgtccagataactgcttttgggagagagagraagtcatatttattaaagatcttgcatcagtacatgtcttgttggctactgaatgtttttgaagaggttgacaggactcaaattgtaaattcatttctgg

SEQ ID NO: 556124 - DNA, 201 bp, Homo sapiens
agattcggcctccctcctccctgcggccggccgcccctcagtgagtacggtccccgcccttcctccgaaggaggccgctgggcccgggcctgcgtgagggrctgcgggttggggtcgcggcccggggaagccaagtttcggagctgaagccggtgctcgccctttccttgccatcggcgcccctgacatggccacaggtgc

SEQ ID NO: 556125 - DNA, 201 bp, Homo sapiens
actacatggactaaatattaactaaatttagtagtgcattactttgaacatttttctgcaagtgtagatacccagcgtttaagctggaatttgctttgagrggcttttaggtgaagggaatgtaggcttagatttttttaaaattgcggatcagtatactttgtaagttctgtaacagctatgtaattggtacgtttattg

SEQ ID NO: 556126 - DNA, 201 bp, Homo sapiens
ctgatgtgcaagtgtttccctctgcctcttgcctgtaaaaaaacagtttgtaagaaacacactttattcagtaatacaaacgaaaagttttctgttgccargattcacaagaagggagctgagttagtggtcactcactgcccaacaccctaatttcacaagtgaagtgaagttccaacaaagtaggcctcttggaagaaa

SEQ ID NO: 556127 - DNA, 201 bp, Homo sapiens
acttctgaaagattatgtccagcctgtggagacttaagtgtccaacatagaaaatatgtgagaggcttttaggagttgcacagtagggattgtgaaggacrtggtaacatgcggattccaaattagggtttacagaggtgttaaaagtacagatctgagagatttttgcctgtgtttgagaaggcttggggtgggtggtgg

SEQ ID NO: 556128 - DNA, 201 bp, Homo sapiens
gccaggagaattgcctgagcccagtagttcaagaacagcctgggcaacatagtgcccatctctacaaaatataaaaaatttgaccaggcgcggtggctcaygcctataatcccagcactttgagaggccaaggtgggtgatcacttgaggtcaggagtttgagaccagcctggccaacacggtgaaaccccatctctacta

SEQ ID NO: 556129 - DNA, 201 bp, Homo sapiens
gaacttcaggtcagtgactatacttgggccttgacctttgaggcctgaggtcaatcttgtgtagaccaagagtggtcctaaaatagctgaaactcttgattctgtatttgatttgaacgagtgtcacacacagcatcagttctgtgccaggcactgtgctaattattgccgctccctgcccagtgaagcacaggcagccca

SEQ ID NO: 556130 - DNA, 201 bp, Homo sapiens
atcttaaaaataggagtgggaggggtaagtgggacttttcaaatacttttttacgtgctttgtaaaacatttgaaagcacgtgagattcctggtgcagagmctaaaagcagtagttatttatttgaaagattttacgctaaaaacaggaaaattaacttgttgggtgtctcgggcttagcatcacagacaatttgtatttt

SEQ ID NO: 556131 - DNA, 201 bp, Homo sapiens
agaacttcaggtcagtgactatacttgggccttgacctttgaggcctgaggtcaatcttgtgtagaccaagagtggtcctaaaatagctgaaactcttgattctgtatttgatttgaacgagtgtcacacacagcatcagttctgtgccaggcactgtgctaattattgccgctccctgcccagtgaagcacaggcagccc

SEQ ID NO: 556132 - DNA, 201 bp, Homo sapiens
gagaacttcaggtcagtgactatacttgggccttgacctttgaggcctgaggtcaatcttgtgtagaccaagagtggtcctaaaatagctgaaactcttgattctgtatttgatttgaacgagtgtcacacacagcatcagttctgtgccaggcactgtgctaattattgccgctccctgcccagtgaagcacaggcagcc

SEQ ID NO: 556133 - DNA, 201 bp, Homo sapiens
gctcttaaaccagtcagggaggaaggggtgggggtggtgatgggcctcaggtatacagcatcatatcttcctttcactattgaacattacaacgaagaccytgactgaagtagaaatggcttgactagaaattttttaatcttgctttatgtacttttccagagagagtttggagatagtaagcgtgtctttggtgagcgt

SEQ ID NO: 556134 - DNA, 201 bp, Homo sapiens
agagaacttcaggtcagtgactatacttgggccttgacctttgaggcctgaggtcaatcttgtgtagaccaagagtggtcctaaaatagctgaaactcttgattctgtatttgatttgaacgagtgtcacacacagcatcagttctgtgccaggcactgtgctaattattgccgctccctgcccagtgaagcacaggcagc

SEQ ID NO: 556135 - DNA, 201 bp, Homo sapiens
tcgcttgaacccggtaggcagaggttgtggtgagccgagatcatgtcactgcactccagcctgggtgatagagtgagactctgtctcaaaaaaaaaaaaaaggaacctctatttatagcactaacttagagcatatgttgctagctgaacattcagataaatgtgttgcatgtacacatgccaagtccttcagttgagcat

SEQ ID NO: 556136 - DNA, 201 bp, Homo sapiens
gtggaagcagggtagatatgaataataaaaacataaacatggacttattctagttgctaagttatagcaaatttaccaaattgagttttctctctttttttcctgttccctgcttgcctgggaacttaccagttagccaagatgcaagtagcaatagctgtttgaatcattatgtcttataccaaaagaaagcaactgact

SEQ ID NO: 556137 - DNA, 201 bp, Homo sapiens
attccaaactgtcagcattacagaggtcttcgtgttccaccccactgtcccaggccaaccgttacaccaaagaacaagattatcgacctaaagcaactggragaaaaacacccaccttggcatccccagttcctacaacaccttttctccgccctgtccaccaagttccccttgtcccccatgtccctatggttaggcctg

SEQ ID NO: 556138 - DNA, 201 bp, Homo sapiens
tcagaaatagaccctctgtttagaatttttggcaaatgctttctggtttccacaggtggaagctggaacgcagtcccaagtgtcaatggcagaacacagayacctgaatccagttccacctttcctgtgtatcctcttccacttatcttacttccccttcatgttgaaccaacgttaataggtgcaaggtaaggaggactg

SEQ ID NO: 556139 - DNA, 201 bp, Homo sapiens
ggtgattgtctcccccgctagactgagagctcttacaagactgggactgtgtttcattttccttttgtcttccctcagagcttagcatgtgcttttgtgtrtgttaggcctaaatgcttgggaaattgaattggataagggaaaggggatgttaaaacttctaggctggtcttgagtattatatggttttaagacttgaag

SEQ ID NO: 556140 - DNA, 201 bp, Homo sapiens
tacaacttgcacttggaggggagaggtcccaaggcccccgaattagaaatgccaggctcatctctttttgtaacccttcattttaaaatgtaattaataascactctttttgttaaatttttaaatttgggccgatcctaataatcttaaaaataggagtgggaggggtaagtgggacttttcaaatacttttttacgtgc

SEQ ID NO: 556141 - DNA, 201 bp, Homo sapiens
gacttattttcaaggatatgtctgatttttggatagatgtttgctctatcttgtcttttctaaatattgataagaatactgcaaaaaatcaatttggatakttgactgaatttatggtatgatttgaattgaaaaattttttaaatgcttaaatctagtttttaagaaagattggcactatttcataatttctaccaaagc

SEQ ID NO: 556142 - DNA, 201 bp, Homo sapiens
ggactttcagaggccgaggtaggtagattgtttgagttcaggagttcaagaccagactgggcaacctagtgagaccctgtctctacccctaatacaaaaarttagtcgggcatggtggtgcacatctgtggtcccagctatactcgggaggccgaggtgggaggatcacttgagtccaggaggcagaggttgcagtgagcc

SEQ ID NO: 556143 - DNA, 201 bp, Homo sapiens
ttactcttctcctgaccctcccctctccttttcagcagatgagccagctggagttgcaacaggcagctttagaagggctggccttgccacatgaccttgckgtacaggcagcaaacttctaccagcctggttttggcaaaccacaggtggacagaaccagagatggattcagaaacaggtaaattactaatcctgctcatg

SEQ ID NO: 556144 - DNA, 201 bp, Homo sapiens
gcttggcttcggtgagtgtagcagcacacttaaaaatgtgtggttaaatttgacctgagtatttaagacatcggtttgaaagtgttgttttgctagatgcytttggggtttttggcttttattcttacatatttaaatttttgttggctttgttttgagaggcttaatggataatatgagatttttgtaccagttaactct

SEQ ID NO: 556145 - DNA, 201 bp, Homo sapiens
agtgcaggagtcaggagtgagatagattggtagtggcacctccttattttacagatgcagagagaaattgagacctggagagaagggatggatttcatggsagagcctggagtagaatccaggggtcttggttcatcccattagctaactacagaatgtctctaggttgcccttgctatgtatttaaaataaataaaaaca

SEQ ID NO: 556146 - DNA, 201 bp, Homo sapiens
ttaaagcagcacccaataaagcaccactttaacgataaagatcaggcttctggtgagaaaaaattatgtttttcttaagtgaggtgaaatctgaatttcarccattcttgtatcaagtgcaggagtcaggagtgagatagattggtagtggcacctccttattttacagatgcagagagaaattgagacctggagagaagg

SEQ ID NO: 556147 - DNA, 201 bp, Homo sapiens
gaatcaaaatactcatcttcttttgtagtcttcaaaatatagtacatattaccattatctttgtgctatcacacagtgttccctaggataatgtaagaaaytgataggtaacttggaagactttgctattaaattggctttgagatatgtctttgtctcattcttaattaaagcagcacccaataaagcaccactttaacg

SEQ ID NO: 556148 - DNA, 201 bp, Homo sapiens
aggagcgcaatttagaactgcacagcgggggagactgagtttgagtgtaggaaacgggaaagggggcgtgtggggtaaagaggtgagcgcagtggagtcargccttagtgaacaagtgtgcttgaaggtggagatgggcacccctctggctgagtctgctccagtagagagctcaggggccagcagcaggcaccgcaagga

SEQ ID NO: 556149 - DNA, 201 bp, Homo sapiens
gagtctccctctattgcccagggtggagtgcagtggcacaatctcggctcactgcaacctccaccttttggtggagcaattctcctgcctcaaccttttgrttcaccttttgggtgattcaccttttgggttcaagcaattctcctgcctcaacctcctgagtagctgggactacagacatccgccaccactcccggctgt

SEQ ID NO: 556150 - DNA, 201 bp, Homo sapiens
gggccaccgcgcccggctatcttgagcattcttgacagactcctcgctgtcaatttatcagtggcaactattcactggttggaaatgggaagcaataataktcatctgaccagttttctcttaaagccatttctatgatgatgatgatgatgggactcaattatgttttttatttcagtcactcctaataaataacaaatt

SEQ ID NO: 556151 - DNA, 201 bp, Homo sapiens
attttgcccatactcgtgtagcagctgatgtgggcaaagctggagctgaaagggaattgcgaggtttcggtgactgcctagttaagatctacaaatctgaygggattaagagcctgtaccaaggctttaacgtgtctgtgcagggtattatctaccgagctgcctgctgcctacttcggtaactatgacactgcaaaggga

SEQ ID NO: 556152 - DNA, 201 bp, Homo sapiens
aagaaaactttctggaggaaggaaagatagaagaaagacctggatatcagcatttggtaacgtctacttcgatcttcctgacaactacattcaaactgacytgagtgtgctggccccaagcacatcatccagcttgagtttcaatgctggttgggagaaaaggaaattgagggcaagtcagagcccagaaaggagcgcaat

SEQ ID NO: 556153 - DNA, 201 bp, Homo sapiens
gcgacaccttgttcgtggaagtaggaggagatacacacccagtacctgtcctcatccaacaaagtcgcaggcacccaagggcagccacgctgccaccgaasgcccccggctgctcacaaccgccggtcagctccggcctctcttcgaaggacacacgcgtctcgcaccccctccccgccccgccctgaggagacatgcgtc

SEQ ID NO: 556154 - DNA, 201 bp, Homo sapiens
tcattactttctagagttgaacacttaaggaaaataggcatggtcttactgattcatcccattcagacaacacaaatcttgaagttgggtatgtcccagtkctataagtagccatatattgatttcccattcctaaatacatttgaacctttaaaaaatcaatttgtttcctgatttttatgatgaattctagaagtatat

SEQ ID NO: 556155 - DNA, 201 bp, Homo sapiens
ccacagctaaccaggctctagaggtgaggccctgaggagggaaccccaggaataaaaatacagagcaggctatttcggagatgccctccaagaacactggygtgtgaggcaggtgggaaacttaagtgaggtgacgaggtgctctttccttctctgctggtgctgcttctgctgccaccagcgcccactcctcctccctac

SEQ ID NO: 556156 - DNA, 201 bp, Homo sapiens
gggttcgcgccattctcctgcctcagcctcccgagtagctgggattacaggtgcctgccactacacccagctaattttttgtatattttagtagatacggkgtttcagcatgttggccaggctgatctcaaacttctgacctcgtgattagcccacctcggcctcccaaagtgctgggattacaggcgtgagccacagcgc

SEQ ID NO: 556157 - DNA, 201 bp, Homo sapiens
ttgccctatgatggtgatagggcaaggattaggctcacagatccaaaaagaactgaattatggaaatatctgccagcctgccagatttctcaccgtcctcrtttttccattattacacgggatatcaagtatatcataagaaaaactggctgcatactttatgcaaataggcatggagagatggcctgtgaagtgtgagcc

SEQ ID NO: 556158 - DNA, 201 bp, Homo sapiens
tcctgtctctactaaaaatacaaaaatcagccgggcttggtggtgcatgcctgtaatcccagctacttgggaggctgaggcatgagaatcacttgaacccrgggggcagaggttgcaatgagccgagatcacgtcacttcactccagcctgggcaacagagagactctgcctctaaaaaaaagaaaggcacagggcaaaca

SEQ ID NO: 556159 - DNA, 201 bp, Homo sapiens
gccacgactcacggggagacacatggccaggaggatggaagaaaagccgagtggagaagagagtggtctgaagtttgggccatctgagccccgctttagcytcgcagataccatcctcacgtttgaattcaaggggaagggatggaggagtcatgcctccaccttgcagggggcttgggcagaaaccgagccctcgagagc

SEQ ID NO: 556160 - DNA, 201 bp, Homo sapiens
tgtattgcacagtggacacctctagaggtccattggtttaaagggatagggaaggaggagggatgagaccatcaccccctcccagaagtaaatctagtatytgagttttctttatgcccttgagtcaaactaataactgtctagtacggaggtgtttgctggttttcttcggtgttttttctaatgcaataaactcatttc

SEQ ID NO: 556161 - DNA, 201 bp, Homo sapiens
tatttagtaccttatttttaccactatgatacagcatattaacattgtgttttagttaattatttgtgtgtctcagtccatttgactttgagcttctcaarggcaggaaagtgatacgttcctgtttgcatttccacacctaacattgtttctggcacatagaggtagaataacgtgctttaactatttaaatggatagca

SEQ ID NO: 556162 - DNA, 201 bp, Homo sapiens
ggaaggcatctggtaagttgggtgggtctccttactttgactagttttgaaacaaggcagcactctatgcatttcaggttctagtctgtggcttccagcakgaaacctagctctccatgctataaatcttcaagccctaaagcagtgcttctcatcagttcttttgctctctcaccctgggacatttggccatgtccagag

SEQ ID NO: 556163 - DNA, 201 bp, Homo sapiens
acgtacttgtattgcacagtggacacctctagaggtccattggtttaaagggatagggaaggaggagggatgagaccatcaccccctcccagaagtaaatytagtatctgagttttctttatgcccttgagtcaaactaataactgtctagtacggaggtgtttgctggttttcttcggtgttttttctaatgcaataaac

SEQ ID NO: 556164 - DNA, 201 bp, Homo sapiens
atcatcattattattattgactgtcccctccccccacctagtaagtgtcatgaaggaggtttttgtttactgatgtatccttagtgccaaggatagtgccyggaaggtagtagtcactcaataaaccattagttcaccgtttaagccagtaggattcacacccaacctgtctacaccagaacctgtgttcttattcactat

SEQ ID NO: 556165 - DNA, 201 bp, Homo sapiens
agcacagtgggaaatgagtcacgtacttgtattgcacagtggacacctctagaggtccattggtttaaagggatagggaaggaggagggatgagaccatcmccccctcccagaagtaaatctagtatctgagttttctttatgcccttgagtcaaactaataactgtctagtacggaggtgtttgctggttttcttcggtg

SEQ ID NO: 556166 - DNA, 201 bp, Homo sapiens
tcaaccaacaaagctaactaaacagaacagctcatctcaacagatgttcatgtcacatctcaggaccaggtcctttgctaggtgctggagttataaagatrcataagaaactgtcctggttactgaggcaactgtagtctaactggggagaaggacacgtgaatagtttcaataccagggtactatgagaacaactataaa

SEQ ID NO: 556167 - DNA, 201 bp, Homo sapiens
tagttagattttgggaaagtgagcatgaagaagggactcagagctgccaggtacccgagtctcaggtctgacatccttgggccccttctgccacaacttcttgccacttcacggacttgaattatgttgcttcttcctggaagtctggcctgcagcacaggcctttcctctccaaaaagctgctgctcatttctggcccca

SEQ ID NO: 556168 - DNA, 201 bp, Homo sapiens
ccgtgggcagacccaacggccagagctaacaggactgcctgggaccgccctgcctcaccagggcttttcctttttaaacaaaacaaaccctaccagatttytattttataattttacatcagagctaacaaccaggggacggctttttaaatttcccagggaaggagaccgtcaggccgcatgtagacaatgctgctaaga

SEQ ID NO: 556169 - DNA, 201 bp, Homo sapiens
ccagctactcgggaagctgaggcaggagaatcgcttgaactcggagggcagaggttgcagtgagccgagatcatgccactgcacttcagcctgggtgataragtgagactccatctcaaaaaaaaaaaaaaaaaaaaaaaaggatgtaggccgggcacagtagctcacacctataatcccagctacttgggaggctgaggc

SEQ ID NO: 556170 - DNA, 201 bp, Homo sapiens
cctgtccaaaggcctggcccggcggctcagccccatcatgctgggtgagggggaaggggccaggtgggcaggagggcgggagccaggccagagggtggcgsctggccgaggtggggagacttgggccacgactcacggggagacacatggccaggaggatggaagaaaagccgagtggagaagagagtggtctgaagtttg

SEQ ID NO: 556171 - DNA, 201 bp, Homo sapiens
agccccgcccccttcggcaaagccccgccccttcctacgtcaggactgtaagcacatgcgcaaaagtgcatccctgcccccgccccctcttccgtgtgggscctccctgtcccctctctgtcacctcacagtagtcgttgccggtagcgggtgtgggggcgcgagcagcgcagggcggcctctcccccacccctcagcccg

SEQ ID NO: 556172 - DNA, 201 bp, Homo sapiens
ttagttagattttgggaaagtgagcatgaagaagggactcagagctgccaggtacccgagtctcaggtctgacatccttgggccccttctgccacaacttcttgccacttcacggacttgaattatgttgcttcttcctggaagtctggcctgcagcacaggcctttcctctccaaaaagctgctgctcatttctggcccc

SEQ ID NO: 556173 - DNA, 201 bp, Homo sapiens
acatgtaaaatagatatagcatttcatattaatttgctggatgttgaaatctgttcttagattttacttaccaatactgaagtagaattttttttttttttgagacagagtctcaccctgttgcccaggctggagtacagtagtggcacgatctcggctcactgcaacctccacctcccaggttcaaacgattttcctgcc

SEQ ID NO: 556174 - DNA, 201 bp, Homo sapiens
tatccccagaaacccctggctaggatccctctatccacttgtggtctttttttttttttttgagacagagtttcgctcttttcacccaggctggagtacartggcgccatctcagctcgtcgcaacctccgcctcctgggttcaagtgattcttctgcctcagcctcccaagtagctgggattacaggcgcctgccaccac

SEQ ID NO: 556175 - DNA, 201 bp, Homo sapiens
tgaacctgggaggcggaggttacagtcagccaagatcacaccatcgtactccagcctgggcaacagagtgagactgtctcaaaaaaaaaaaaaaaaaaaaagaaggaacaggtaagagaaagcaggtatccttaatttctccagtttcactgaactattaaatgtcttcacgtaaataaacaaattgcagccatttaaaca

SEQ ID NO: 556176 - DNA, 201 bp, Homo sapiens
ttgaacctgggaggcggaggttacagtcagccaagatcacaccatcgtactccagcctgggcaacagagtgagactgtctcaaaaaaaaaaaaaaaaaaaaagaaggaacaggtaagagaaagcaggtatccttaatttctccagtttcactgaactattaaatgtcttcacgtaaataaacaaattgcagccatttaaac

SEQ ID NO: 556177 - DNA, 201 bp, Homo sapiens
cttgaacctgggaggcggaggttacagtcagccaagatcacaccatcgtactccagcctgggcaacagagtgagactgtctcaaaaaaaaaaaaaaaaaaaaagaaggaacaggtaagagaaagcaggtatccttaatttctccagtttcactgaactattaaatgtcttcacgtaaataaacaaattgcagccatttaaa

SEQ ID NO: 556178 - DNA, 201 bp, Homo sapiens
agttagattttgggaaagtgagcatgaagaagggactcagagctgccaggtacccgagtctcaggtctgacatccttgggccccttctgccacaacttcttgccacttcacggacttgaattatgttgcttcttcctggaagtctggcctgcagcacaggcctttcctctccaaaaagctgctgctcatttctggccccat

SEQ ID NO: 556179 - DNA, 201 bp, Homo sapiens
acataaataattagttacaaattgcataagtgccttctgcacaggaagcacactgggtgctgtgatagaaaataacaagagagacctttttttttttttttagacgagtcttgctctgttgcccaggctggagtgcagtggggtgatctcagctcactgcaacctctgcctcccaggttcaagtgattctcctgcctcagc

SEQ ID NO: 556180 - DNA, 201 bp, Homo sapiens
tgtcatacagggaggaggatgctactggcatcttgtggatagaggcagggacgctgctcaacagactagaatgcacaggacagccccacacaacaaagaastatccagcctcaaatgtcaatagtgccaagattgagaagccctgatctgtggtatttatcatattcatacctttggtttgttggttttataagactggtc

SEQ ID NO: 556181 - DNA, 201 bp, Homo sapiens
ttatgcttttttttacagaataggaaactatagtttaaacagtgcgtccaatagaactttctgcagtgatggaaatgttctagatctgcactgtccagtargtaaacactagtcacatgtggctattgaatacctaaaatgtggttagtggaactgagggactgaatttgtgcatttatttaacttaaatagccacatgtg

SEQ ID NO: 556182 - DNA, 201 bp, Homo sapiens
gaggctgaggcaggagaattgcttgaacccgggaggcgggggttgtagtgagccatgattgcaccgctgcaccccagcctggacaacagagcgagactccrtcttaaaaaaaaaaagaaagaatgaataaataaggggatcttttttctatagtccctatctccactctatgaatggatgagatcctaagtgtaccttgat

SEQ ID NO: 556183 - DNA, 201 bp, Homo sapiens
ttttacttaccaatactgaagtagaattttttttttttttgagacagagtctcaccctgttgcccaggctggagtacagtagtggcacgatctcggctcaytgcaacctccacctcccaggttcaaacgattttcctgcctcagcttcccgagtagctgggattacaggtgcctgccaccatgcccagctaatttttgtat

SEQ ID NO: 556184 - DNA, 201 bp, Homo sapiens
ttggcattctgtacttttccagcctccccttaattgcagctcataattatatactggttaaggggatttttcagtttcccttccctgctacactaagcttyttaacggcaagaatctcatctattttgtccacaccacagccccagtgcctagcataaggcctgacacataataagttctcaatccatagttgttatatga

SEQ ID NO: 556185 - DNA, 201 bp, Homo sapiens
cttctgaactatagcttccaatttcaatccccgtcctttccgtgggggcagtattttggtcttagcagggcttgtgagggtaacagcagggcagtttctaytatctggacttggaaggtccttggaggaatctctcttagggatagacttgatatcctgactgtgagaaagatgggcataggaattgaatgctttatcagc

SEQ ID NO: 556186 - DNA, 201 bp, Homo sapiens
gggacttcagctgttcttcaggttgtgaggagccttcagaatttgtgcagctatctgctttcttggaagatgagggcctcttggaggtcttcttctgaggmgtcagggcatcagaaagtaacatgtgctggacagtgttaggaagattggccacttgagtactcagagcactcaaactactcaacccaggatctgtcagtc

SEQ ID NO: 556187 - DNA, 201 bp, Homo sapiens
gggacacacagtgaaggccaggagcctccacagggtccaccaccaacagccgctgttccgtggtacccctgggagctttcagcagggagcctgcactcacrcccctctgcagatgtgctgctgatatgggacacacccgagaccaatgccagggccactgtgtggctctggatctggaatgtgattaaaggcagcaatgac

SEQ ID NO: 556188 - DNA, 201 bp, Homo sapiens
gcaaacgattcccccccagagggagttacagttgtcagcttcagggagacctgatgatttgccagcagggtcataggtgcaatgctgctggcctggaagaygggagaagggacagggcggcagctgcagaatttttaaaaggcaaggaagcatgttctcccctaagactctggacttttccaaagcccagcccacacctca

SEQ ID NO: 556189 - DNA, 201 bp, Homo sapiens
ggtaaccttgatggccagaggtctcgctagccatcgctgccgcagcagctgctgctcctcgtcgtccaccaccactgccactgccactgctgccactactrccacctgtacctccaaaattctggaacatctgggcctgacgagggctgaactcttctagccgggatgagccgtgtacctcctgtgggtagctttgctggt

SEQ ID NO: 556190 - DNA, 201 bp, Homo sapiens
tggctggagaagtttgccgagaaagatcccaacaggattcttgtaacttctgggagccatgctttaattccatgcccttgttaggcagaccatcactagayattaggcagcgcccagcctcctgggcactggggtcatggtaagtccccactggtgggccatacatcataccatctttgtcatttttcagagggctccgta

SEQ ID NO: 556191 - DNA, 201 bp, Homo sapiens
attttactttaaaatcaagtgtaatgctccccacatcatccccctacctctagagagaaaaaaaaagtcaagaaataaatcgtagtaaaatttgagtcctycaatttgtcatgatttattctgtaaggtaatatatgcaataaaattcaaaactgaaaatttcacttgattccttagaatttggacgaaatcctgaaagaa

SEQ ID NO: 556192 - DNA, 201 bp, Homo sapiens
agataattttaaaacagaatcaaaagggatagcgcacctttcatttaaacaaagtctttccagactaaaaatagatttatatatatatatttatccctccyttttaattccccccaccctttccccatcatcccacccctcccccctccccccacattgtcactatggagattgtgtccatggaaacagccattccaacgt

SEQ ID NO: 556193 - DNA, 201 bp, Homo sapiens
caatgggtctccccttcttctttcctgatgggaaatatccctttggagggaaaccctcttgcttcggtgaaatcgtcactgtatcgttctccttctcttcwgccttggggtttgcctcaggggccaatatgcccactggaggtacattctttgagtctggaaagattaaaggtgctgttccacccagggaaccatctggtc

SEQ ID NO: 556194 - DNA, 201 bp, Homo sapiens
ttgtcactatggagattgtgtccatggaaacagccattccaacgtcttgggtctttctttcctgtggtgtcactggtttgagtgtgatgtgagaacttaasgaagtgctggcatgggcaggcacgcgggcggggcggggcggggcagggcagggtgtggctgcacggtaggacgatttccattccatcacgagtgtccacc

SEQ ID NO: 556195 - DNA, 201 bp, Homo sapiens
aggtgcgcgtcacatctggctaatttttgtagttttagtagagacggggtttcactattttagccaggctggtcttgaactcctgaccccatgatccaccygcccggcctacaaataattcttaaaacttgacattaaaaagataaacaacccaattttacaatgggcaaaggatgtgaatagctatttctccaaagaaga

SEQ ID NO: 556196 - DNA, 201 bp, Homo sapiens
caaacggctccaagttcacacttatttactacatggatgtaagggtaaaaagacttgttcttggcatcagttttatccagtggctgggtggcatattttartttgatctcaggttcttggggttccacaatgggaactgcttgtttggtttttcgcttcctcggctgggccccaggcttccttctctccctcctttgcctc

SEQ ID NO: 556197 - DNA, 201 bp, Homo sapiens
cccgaaactatctttgtaactatagcgcagacttccaggagatttgctaggctcagttctgctcgtaaaaccagggcccgctgcagagtggccactctggmcatttccttctccattatggttggagttgttatcgccattcttgtttcctttgctccctcctcctcctggaggctctggctggggaagtgatgcatgact

SEQ ID NO: 556198 - DNA, 201 bp, Homo sapiens
acatgttttaacggaaagtggcccagatacagagcttgaacctttcaccagactttgtcactgtctcagaggcagggctcgctgacttgaggtggcaaacygcaaggactgagtcaactagcgttgtttaatccttatctgagggaagctttaagggagccttctccaagcctgatgcctgctcattcacagaaaggctct

SEQ ID NO: 556199 - DNA, 201 bp, Homo sapiens
catacctctttttatgccattgttgctttaaaaaatccagattctcaggccgggcatggtggctcacgcctgtaattccagcactttgtgaggccgaggcrggcggatcacctgaggtcacgagtttgagaccaggctggccaacacagtgaaaccctgtctctactaaaaatacaaaaattagctgggtgtggtggtgca

SEQ ID NO: 556200 - DNA, 201 bp, Homo sapiens
aatttgccttattaatgtgtcaatcctgattccacagcataaaactgcatgtccagaaagtagaaacatgggttggatgaaaattaataagaacttgatcmggctggtctttccccttgacatgcaggtttctctaaaggttgtaagacactgtgtgatcaaggtgccttttattctcagggctcttttctttgatattta

SEQ ID NO: 556201 - DNA, 201 bp, Homo sapiens
aaccctttgaagcctgcagcatgagaattaggactgggcatcattgatggggttggactgagttgaggcattaactgtaaaattctgtttctggaacccayaggcacactgccttgcccacactggagattctccccagtctgcatgagaggagatggggtagaactacagcttggagactgaaccacagaggcagctgga

SEQ ID NO: 556202 - DNA, 201 bp, Homo sapiens
tgtataaacttcttaggggaagtgaatcttctacctcaaacttggagtttcaccgtgatgttaataatggagacagggaaggaggcacaaagaaaagaccrtaattgggagataggggacatgataagagtaaagggcaagctccttgcatgactgaattaaaatgttctaatttcaaatatatatttcacattcaatata

SEQ ID NO: 556203 - DNA, 201 bp, Homo sapiens
actgaagctgctgatctggaatagcagcagggctaaaagaaacttatacttggccctgtctctcactggtacaggagcctaggcaagttaatttaagtctygattttctcaacaatacattggggataatacccagttgggaaaaaagggcacggtgggggtatcttctgctacttaaagacactgatcagggcaaaataa

SEQ ID NO: 556204 - DNA, 201 bp, Homo sapiens
gacttatttttgttatgattagaaagaaaagtccatcaataaacttgtttcctggatacaaagttacatcatacacagagagcaatttccaagaagactgkgtggaataatacaagcgtccatccccacagagcagtgcaggcctctgggtcactgtgacttgggtcatcaaaaagaccgcaatgaccaagacatggtcat

SEQ ID NO: 556205 - DNA, 201 bp, Homo sapiens
catggtcatcttgtgaaactgcctctgggtcccaggtctccacatgaaggagcaaagtgcacagcagcagaggcagcaaagccagaggccgacagccctaycctcactcctcccaacccagacccctctgtcttgctggacacgcggccaccaacttctgttaaatagagatgctaccagcttaactaggcaggctaccaa

SEQ ID NO: 556206 - DNA, 201 bp, Homo sapiens
cagagcgacgattcccacttcagagcccatttcaccatagagtcatgtggtagcactttgcctagcctcaattcagtgcataaaggcacgaggctgcattytgaaactgaggaaatagggtacaactgtgcacaacagagaggttttcttcaggcccataaaaatgtttgacatgtgctctttctcagtgtaattaaatac

SEQ ID NO: 556207 - DNA, 201 bp, Homo sapiens
tgacatagagcttctctaaccacacaccagctaaggggccgaggctgaggctgagtcaccctgcaagttccctgacaggagtttaacttcacatttcaackggttttccagtagagactcaagatatttgttgaattgaaagggatgcctgcttttacatactatttgctgttagctcttttaacagattagcaataacta

SEQ ID NO: 556208 - DNA, 201 bp, Homo sapiens
acacttgatggggtccttgaggtcctcaccagccacagtgacccaggacacagctatgacctcaggcatctgccaatttcacccccaaaaagaaaaaattaaaaaaaaaaaaccataaataaatagtgtttctggaaatgaaaaaaaatttatttttgtgtttaaacatcattcccctactcttgaaaacatggaccatcc

SEQ ID NO: 556209 - DNA, 201 bp, Homo sapiens
gcttcgagtccaaaacagtcttttcactgctgccctcagtggctgcttttttacaagggagccccctggacagggaccgagggcctccaccacagtcttcygagcggtggcgccgcttaaacctggggtgtgcggccaggcttctctgctccttctgctgctgctgctgctcttcctcctcctcagtgtccgtcttggagc

SEQ ID NO: 556210 - DNA, 201 bp, Homo sapiens
cagaagtcctcccatttgagagaaatgacccctcaatgaatatttctgagacaactagtcctcctgccccatcctgtagcagcaagtgccacaaggtacattttggtttttcttttctttacaacctatttcccttcatgcctcagtgacgcagggagggtgaaggagcagcatggagctcagaggcctgcagcttctaga

SEQ ID NO: 556211 - DNA, 201 bp, Homo sapiens
tcctcccatttgagagaaatgacccctcaatgaatatttctgagacaactagtcctcctgccccatcctgtagcagcaagtgccacaaggtacattttggkttttcttttctttacaacctatttcccttcatgcctcagtgacgcagggagggtgaaggagcagcatggagctcagaggcctgcagcttctagagacccc

SEQ ID NO: 556212 - DNA, 201 bp, Homo sapiens
actagcagcctgtgcacccacagatttcaagtgcaatagtaataagcaatgaacatacacatgaaaacttttcaggtcccggtatcctaaaacaaatcaaraagacccttttatatttggccagacctggaacatcatagcctgtctttcgttggagcccatgagtatctaagagagtgggcggcagccttcttggctccg

SEQ ID NO: 556213 - DNA, 201 bp, Homo sapiens
tgagtgctgctaatgggtgggaagtttttttatgaagtgacaaaaaaaaaaaaaaaaaaaagaaaagaaaagaaaaaaaacaacgacaacagagagaatcwaactgtatgtcctaatcctttggatgctctggacaagggtctgtggtctcctcttacctgcatcaatggcacacgggtaatggtatcggaaggagcagcc

SEQ ID NO: 556214 - DNA, 201 bp, Homo sapiens
caagatcaaagtctgcagcagagatagcagctttaaaatgctactgcaacgagagctgcagaaagtagaattcccagctgttttttcatgagagtagaagaaaaaaaaaaaaccctccacacaaggttctttacgcacagtggaattattaatgagctaccacagcctttttttctcgtcttaattgttgtggctcattgc

SEQ ID NO: 556215 - DNA, 201 bp, Homo sapiens
ggatttgctaattacctaggtctgatcattttatatatatattgaaacattactgagcaccccatatctacaattactgtccattaaaaaaagtaaaaaasgctgggcgcggtggctcacgtctgtaatcccagcactttgggaggctgaggtgggtggatcacctgaggtcgggagtttgaaaccagcctggccaacatg

SEQ ID NO: 556216 - DNA, 201 bp, Homo sapiens
ggccacagaacagtgaccagctgtgatggaccattaataaaacacgcctcatgttaggaaatgcgttccctctgagttagaagcagaaaagagtaagacaytatgaatgcacgctaacgacaacttgaaactaatgccagatacatctggaaatgaagtctcctacagcaatctgcctgaggcagtgtccatctctgacaa

SEQ ID NO: 556217 - DNA, 201 bp, Homo sapiens
ggtcgggagtttgaaaccagcctggccaacatggcaaaaccccgtctctactaaaaatacaaaaattagccgggcatggtggtgggcgcctgtagtcccarctactcgggaggctgtggcaggagaatcacttgaatctgggaggcagaggttgcagtgggctgagatcatgccattgtactttagcctgggcgataagag

SEQ ID NO: 556218 - DNA, 201 bp, Homo sapiens
gtgagtggtggccatttaggaatgggtatggtcaagcatttctggtaggaaagtctgcaggaaaaagggcttctgaaaacattttgcactccccccaacctttttttttttttttttaatatattttgagacgatgtcttgctctgtcacccaggatggagtgcagtggcacaatcatggctcactgcagtctctacctcc

SEQ ID NO: 556219 - DNA, 201 bp, Homo sapiens
agaacaccaaagcaactgggtcacagtagtattatagcacactgatgacaactggttttgttcaagccttgcagattaccctccactactgtgcctaagayggctcttatccagcatggcacacacttctgctcatgctcacaatatttacttactcatgtttgtccatctcccctaaactgtgagacttgttcttgcacc

SEQ ID NO: 556220 - DNA, 201 bp, Homo sapiens
cctttttttctcgtcttaattgttgtggctcattgcattaaatacattaattaaaaaaaaaaaaaaacagagctcatgctcttattactgtaacccccccmacctggagccaaatcctgtgcctatgacataacaagcaacacaaaacagctgaccatgatgtcagaaatgcagggtcaacatcaggtgggggggaaggtg

SEQ ID NO: 556221 - DNA, 201 bp, Homo sapiens
aattacattatactcacgctaaactaagaaaaaagaaatcacagattagaatgaaaattaaaattacaaaataaagtaaaaaaagcaacacagacttgtayctacactgtgatgatggagactcacaaggtttgaatcctgggcaagctcctctctggacctcaaatctcacctggagtgtgatgagacccaccagaaagg

SEQ ID NO: 556222 - DNA, 201 bp, Homo sapiens
tgacatcttagaagctggaccagaaggcaggctatcagcagaacgggggcagcctccaggggggcccttgctgaagtgtgctcgggtgggatgtggcaccrgcctgtcagcacaccctaatgtgtccctgaacacagcctcagtgggggaccacttcttacccagctgcgaactgggagagccaaaactcacagtattccc

SEQ ID NO: 556223 - DNA, 201 bp, Homo sapiens
caccttgtgcttagggcacctcaccgagaagttctcctcatgtagcaaacaatctggaagacagaaggggacagtcagatggagacttcacagctggacayaggtgtggtcatgctggctgggattgacagggtcagacataaaggtagcaggtcgctacacttacttctaataggaaaacattagagacaacccaagtaa

SEQ ID NO: 556224 - DNA, 201 bp, Homo sapiens
gggagccaaaagttcacctagtgtctaccctccaggagctcacagaatgatctgggggtaaagcaaaatttaaacagtgatgtaaacagtacttcagagcrcagacttaatgccaccaacctagttaaggaagtcaggaaagcattcttgagggagtgtagcttgacctgagtcataaagagtgagtaagagctacctggg

SEQ ID NO: 556225 - DNA, 201 bp, Homo sapiens
gcccacagtcagttcttcatgcttaaaaagaacactcttcccatggcctctaacagggagggcaggttttctgaggctcagacagagctggactatgttamtcctttcgacctctcaggaacctgagacccctaggtctcccatccccaggctggagggcttctctcctcttccagcccatgtgcagaaggggattctgat

SEQ ID NO: 556226 - DNA, 201 bp, Homo sapiens
aatgtgacacaccgccaaggccagagtgctgtgcttgaaactggcccacatgaccctcactcccatactgattgccaaagctgctcccctgggggggtccrtagctctgcacaggcccagaaggccttcgctgaggaggctgtggggttcctgtagtcacggggtctttgttgcctgccatgtagtaaaaatctccagcct

SEQ ID NO: 556227 - DNA, 201 bp, Homo sapiens
ccttcccactttgagacaaattaatgacaaaaggatggttctgctgtggtttgctttttcaatcctgggtctagtgttttctgaactggtgtgagacaggmtaaagatcaacgccacacacacaccccgtccttcatgagatgagggtttgttcagttcaatctcacatttaaatttcacttgtcatcggaacaaatttgg

SEQ ID NO: 556228 - DNA, 201 bp, Homo sapiens
gtcttgctggacacgcggccaccaacttctgttaaatagagatgctaccagcttaactaggcaggctaccaagatgggccccaaaacagaaaatgacagayaccatttactcacaagtcctcagctaataatgagggtcctgcgcttctctgctggtgggctggggtgacaacctgggcacaagcttccactagaggagag

SEQ ID NO: 556229 - DNA, 201 bp, Homo sapiens
ctgggactacaggtacacgccaccatgcttggctaatgacagtcttttttttttttttttttttttttttttttttgagacagtcttgctctattgcccaractggagtgtagtggtgtgctcttggctcactgcagcctctgccccctgggttcaagtgattcttgtgcctcagcctcccaaatagctgggatcacaggt

SEQ ID NO: 556230 - DNA, 201 bp, Homo sapiens
tcctgcaggaggcttgggaatttttcatttctaccctttcgttccccatggccagtgaaatctcccttttcttgccctgtaggatactgaggaaagccacygacatttcgtggcacggctgacccgaaactatctttgtaactatagcgcagacttccaggagatttgctaggctcagttctgctcgtaaaaccagggccc

SEQ ID NO: 556231 - DNA, 201 bp, Homo sapiens
cagcctcccaaatagctgggatcacaggtgcacgccaccacacccggctaatttttgtatttttaggagagatgtggttttgccatgttaggctggtctaraactcctggccccagctgatctgcccacctcggcctcccaaagtgttgggattacaggcgtgagccactacacctggcccacagtcagttcttcatgctt

SEQ ID NO: 556232 - DNA, 201 bp, Homo sapiens
agaaaccgaagtacagagacatggagtagtctgatcttagtcacacagcacctatcatatcactctgtcagaacatggcgcactaggaggcagacacacasgcacattcgctgtctgttccctgccttgtcagggcacccaataatggtggctctctgtccccagcatggggcccaagatgagtcctcctttagtcagagg

SEQ ID NO: 556233 - DNA, 201 bp, Homo sapiens
cacccatgttccggtaactggcccacttgccacacagacagcaaaccaggtgccccataaccgaagactctgtcacaacaggtccctgcagcataaaggaygaggccgggagcgccttgctttcagtgctgctaggtggaggggtcagtgacctctgacccttcctgcccctcactaatttggtctgttcttcttcctcag

SEQ ID NO: 556234 - DNA, 201 bp, Homo sapiens
aggaggctgaggcaagagaatcgcttgaacctgggaagcggaggttgcggtgagctgagattgcgccattgcactccagcctgggcaacaagagcgaaacyccatctcaataaagaaaaaaaaatcaagacatctgaagaacctctaacaagaaagagaaaataggaaacagacaaagatttttaaaaattatagtacagg

SEQ ID NO: 556235 - DNA, 201 bp, Homo sapiens
agaggaaagagaaaggcaccacactcaacgctctatcaagaaggcactcagcagcccccacttgacttctcaaatggcgtggcagccgaggggccttctcyggaaattagtagtggtaacaaggaggagggcacgttccagaaggtggtcaggcacatggtggtgccggaagggacacgtctagcgtagctgtgtgagtca

SEQ ID NO: 556236 - DNA, 201 bp, Homo sapiens
gggctcttggcactgggactggctcctgtgaggcagacggctgtcccccggggaggagtcagactactggcatttcctaatgacccatccagggctctgayggcaccagcaagatcaaagtctgcagcagagatagcagctttaaaatgctactgcaacgagagctgcagaaagtagaattcccagctgttttttcatgag

SEQ ID NO: 556237 - DNA, 201 bp, Homo sapiens
ctcacgcctgtaattccagcactttgtgaggccgaggcgggcggatcacctgaggtcacgagtttgagaccaggctggccaacacagtgaaaccctgtctytactaaaaatacaaaaattagctgggtgtggtggtgcatggctgtaatcccagctactcgggaggctgaggcaggagaatcgtttgaacctgggaggtgg

SEQ ID NO: 556238 - DNA, 201 bp, Homo sapiens
ctcaaaaaaaaaaaaaaaaaaaaaaaaaaaaaaaaaaatccagattctcacccgtgagctgtgttatgaggaagggacctctgcaataatgtgaaggtaayccttggctaacgaaagtaaaaacaccagacccatgcttcttcagaatcataaagtgtaagttattctactgaatgtcaagaaggcagtttgacttcctaa

SEQ ID NO: 556239 - DNA, 201 bp, Homo sapiens
aaaaaaaaaaaaaaaaaaaaaaaaaaaaaaaatccagattctcacccgtgagctgtgttatgaggaagggacctctgcaataatgtgaaggtaacccttgrctaacgaaagtaaaaacaccagacccatgcttcttcagaatcataaagtgtaagttattctactgaatgtcaagaaggcagtttgacttcctaacgagct

SEQ ID NO: 556240 - DNA, 201 bp, Homo sapiens
ggtcattgtgattctcatacacaattataccaaggcaaacagtggtcaatgttggacagaagcaaaggggacttgtgctgaaatgaatagattcacaagtsccacacttgtgggaagggaaaaaggaagggaaaaaggaagggaagtaaacaccatttttaaatatagaaatgttctagttttcggcaattttcagagtag

SEQ ID NO: 556241 - DNA, 201 bp, Homo sapiens
tcctgggttcaagcaattcttccgtctcagcccccgagtagctgggattacaggcgtgcaccaccacgcctggctaattttttgtttttagtagagacagrgtttcaccatgttggctaggctgatcttgaactcctgaccttgtgatccacccaccttggcctcccaaagttgctgggattacagtcatggaccaccgtg

SEQ ID NO: 556242 - DNA, 201 bp, Homo sapiens
atgttcttgcagcagctctggtggcagctgtccttgaggaacctttggtgtgtggtgggaagctatcagaacaagaaatgtaggcatttcccgtttttttkggggggggggtgggggggcagggctctgccctcttgaaaggcatttacttgtttaacacttgtccagctacagtggggtacagtagctggctattcacag

SEQ ID NO: 556243 - DNA, 201 bp, Homo sapiens
gtaatgataaaatggctatccgcaggtctcactcactgcagtccttactcatgtccctacccccagctcgaggaggtacttctcctctttctcaaaacctwtattctaattgtactttttaccatctttcatcttgcagccatcggaagactgtgtgaaaaatgtgagtggaacacaccgtcccaacaacccacccttccc

SEQ ID NO: 556244 - DNA, 201 bp, Homo sapiens
tgtgtgatctgtggaggacctggggtctctgatgcctattattgtaaggagtgcaccatccaggagaaggacgtaagtgtacagctttccatctgaccttycctccttttgtttagtaacactttgccatccactgcaatctcctatggtctatggagattactgtgttcatctagtcatctaggttataatttcttcaag

SEQ ID NO: 556245 - DNA, 201 bp, Homo sapiens
tgtaggtttggttcatatggaaatttgtaatgataaaatggctatccgcaggtctcactcactgcagtccttactcatgtccctacccccagctcgaggakgtacttctcctctttctcaaaacctttattctaattgtactttttaccatctttcatcttgcagccatcggaagactgtgtgaaaaatgtgagtggaaca

SEQ ID NO: 556246 - DNA, 201 bp, Homo sapiens
atgcctggcttttttttttttttttttttttttgagacagagtcttactgtgtctcccaggatggagtgcagtggtgtgatcttggctcactgcaacctaygcctcctgggttcaagcaattcttccgtctcagcccccgagtagctgggattacaggcgtgcaccaccacgcctggctaattttttgtttttagtagaga

SEQ ID NO: 556247 - DNA, 201 bp, Homo sapiens
cttgcctcgcaggcgccacgtttcccgcctctcaggcgcggggtgttgtaggagcgcgcaggtttgtggcctctgatgagaagagggcgggggtgcgcgtrctgggagccccaggcaggtatcggggggtggggtctgaaccaggtccagagaaactctgagcttgcccagggcgttggaggagattcaggagggtgcttg

SEQ ID NO: 556248 - DNA, 201 bp, Homo sapiens
agcagctctggtggcagctgtccttgaggaacctttggtgtgtggtgggaagctatcagaacaagaaatgtaggcatttcccgttttttttggggggggggtgggggggcagggctctgccctcttgaaaggcatttacttgtttaacacttgtccagctacagtggggtacagtagctggctattcacaggcatcatcat

SEQ ID NO: 556249 - DNA, 201 bp, Homo sapiens
gccatcggaagactgtgtgaaaaatgtgagtggaacacaccgtcccaacaacccacccttcccactcccagttttctgtggaaccagcaaaagtgccacaragagggctttgagtagatgtgcctggaagtatgtgaacactgaatgctgcactttagccaaaggcccctctaactccccactgccgcttgcacatttaac

SEQ ID NO: 556250 - DNA, 201 bp, Homo sapiens
atggtttttcttgaattcgagaagcatagatctgttctccatattggtatgttctccctcaaccaagatcttctaaaaagaaataatattttagtcttctrcttgaggaactgactgtgaagcgacgcccagtgaaaaacatgttcttgcagcagctctggtggcagctgtccttgaggaacctttggtgtgtggtgggaa

SEQ ID NO: 556251 - DNA, 201 bp, Homo sapiens
tgctgcagctgccagaaaacatgcctactactaccagcagaaagggagcagagcccagagcatcaccaggagtgcctgctagtgtactggcagcttgccamcccctcctctcccttcacccagacacgtggtagggatggaaaaggattcttcacagagcactctggcacaccatatcggagaaaacttgatagattagtt

SEQ ID NO: 556252 - DNA, 201 bp, Homo sapiens
ttttctttaggtcatgatacagtgcctgacatgcggtgcaagcatggtacttgtattttggtgctgtccctgtaagtcatccagaggtatcccctgtaggktgtctagcacatagtaggtgtttgttaattacttctggtctataagcagtgaaagcatgataaggtaacagcagtgaagaaaagtaacaaacagttccta

SEQ ID NO: 556253 - DNA, 201 bp, Homo sapiens
cagcaattatacaggcttatcatctccgaggtgcttttctaagctcttcacatatgttaattggtaaacttttgtatgtgttgaggggcttgagatggacmctggggaaaccaagttttgtgatgccaagaggagggccctaaagtcactgtcaaaaggagactagtgtatttcccaggagactagtatatttccccatgg

SEQ ID NO: 556254 - DNA, 201 bp, Homo sapiens
gcgctgtgtgatctgtggaggacctggggtctctgatgcctattattgtaaggagtgcaccatccaggagaaggacgtaagtgtacagctttccatctgaycttccctccttttgtttagtaacactttgccatccactgcaatctcctatggtctatggagattactgtgttcatctagtcatctaggttataatttctt

SEQ ID NO: 556255 - DNA, 201 bp, Homo sapiens
caatcctcctgcctcggccttcgagtagtagctgggactaaaggcacatgctaccacactgggcttaaattttttatcttaagtcactcttggttcaggcycaaagacttaacaacttctctgttctgttttccagagagatggctgcccaaagattgtcaatctggggagctctaagacagacctcttctatgaacgcaa

SEQ ID NO: 556256 - DNA, 201 bp, Homo sapiens
taaacatcatcctgatttgatcttttgccgcaagcaggctggtgttggtgagactgcgccctacccctggctgtctgggcaggggtggtattaggagctgrggggtcgggggttcccgtctcttccttaggggcttgcctcgcaggcgccacgtttcccgcctctcaggcgcggggtgttgtaggagcgcgcaggtttgtg

SEQ ID NO: 556257 - DNA, 201 bp, Homo sapiens
tcttcacagagcactctggcacaccatatcggagaaaacttgatagattagttaatggtttttcttgaattcgagaagcatagatctgttctccatattgrtatgttctccctcaaccaagatcttctaaaaagaaataatattttagtcttctgcttgaggaactgactgtgaagcgacgcccagtgaaaaacatgttct

SEQ ID NO: 556258 - DNA, 201 bp, Homo sapiens
cctcccaggttcaagcgattctcctgcctaagcttcccaagtagctgggattacaggcacatgccaccatgcctggcttttttttttttttttttttttttgagacagagtcttactgtgtctcccaggatggagtgcagtggtgtgatcttggctcactgcaacctatgcctcctgggttcaagcaattcttccgtctca

SEQ ID NO: 556259 - DNA, 201 bp, Homo sapiens
tggtagggatggaaaaggattcttcacagagcactctggcacaccatatcggagaaaacttgatagattagttaatggtttttcttgaattcgagaagcawagatctgttctccatattggtatgttctccctcaaccaagatcttctaaaaagaaataatattttagtcttctgcttgaggaactgactgtgaagcgacg

SEQ ID NO: 556260 - DNA, 201 bp, Homo sapiens
ccagacacgtggtagggatggaaaaggattcttcacagagcactctggcacaccatatcggagaaaacttgatagattagttaatggtttttcttgaattygagaagcatagatctgttctccatattggtatgttctccctcaaccaagatcttctaaaaagaaataatattttagtcttctgcttgaggaactgactgt

SEQ ID NO: 556261 - DNA, 201 bp, Homo sapiens
ctggcagcttgccaccccctcctctcccttcacccagacacgtggtagggatggaaaaggattcttcacagagcactctggcacaccatatcggagaaaamttgatagattagttaatggtttttcttgaattcgagaagcatagatctgttctccatattggtatgttctccctcaaccaagatcttctaaaaagaaata

SEQ ID NO: 556262 - DNA, 201 bp, Homo sapiens
gcctgctagtgtactggcagcttgccaccccctcctctcccttcacccagacacgtggtagggatggaaaaggattcttcacagagcactctggcacaccrtatcggagaaaacttgatagattagttaatggtttttcttgaattcgagaagcatagatctgttctccatattggtatgttctccctcaaccaagatctt

SEQ ID NO: 556263 - DNA, 201 bp, Homo sapiens
tgcctgctagtgtactggcagcttgccaccccctcctctcccttcacccagacacgtggtagggatggaaaaggattcttcacagagcactctggcacacyatatcggagaaaacttgatagattagttaatggtttttcttgaattcgagaagcatagatctgttctccatattggtatgttctccctcaaccaagatct

SEQ ID NO: 556264 - DNA, 201 bp, Homo sapiens
gcagctgccagaaaacatgcctactactaccagcagaaagggagcagagcccagagcatcaccaggagtgcctgctagtgtactggcagcttgccaccccytcctctcccttcacccagacacgtggtagggatggaaaaggattcttcacagagcactctggcacaccatatcggagaaaacttgatagattagttaatg

SEQ ID NO: 556265 - DNA, 201 bp, Homo sapiens
gggcagggctctgccctcttgaaaggcatttacttgtttaacacttgtccagctacagtggggtacagtagctggctattcacaggcatcatcatagcccmctagtctcatattattttccttttgagaaattggaaactctttctgttgctattatattaataaagttggtgtttattttctggtagtcaccttccccat

SEQ ID NO: 556266 - DNA, 201 bp, Homo sapiens
ctgtgaagcgacgcccagtgaaaaacatgttcttgcagcagctctggtggcagctgtccttgaggaacctttggtgtgtggtgggaagctatcagaacaaraaatgtaggcatttcccgttttttttggggggggggtgggggggcagggctctgccctcttgaaaggcatttacttgtttaacacttgtccagctacagt

SEQ ID NO: 556267 - DNA, 201 bp, Homo sapiens
tctgtccctgagacttattctagatgtcacttcccctacttcacattatacacgaatgttctgaggacatttgagatggaatctagctcacattttcagcmctagtttccaaggaacacaaagaagtccagtgacatgatccaggctctcagccttacagatcatcatgtagattaagtggccgaggctctttcctatgca

SEQ ID NO: 556268 - DNA, 201 bp, Homo sapiens
aattatacaggcttatcatctccgaggtgcttttctaagctcttcacatatgttaattggtaaacttttgtatgtgttgaggggcttgagatggacactgkggaaaccaagttttgtgatgccaagaggagggccctaaagtcactgtcaaaaggagactagtgtatttcccaggagactagtatatttccccatggcagg

SEQ ID NO: 556269 - DNA, 201 bp, Homo sapiens
tgcagagtcagtcatttggggtctggccttctgcagggaaatgaagatgagcttggctcagagcccaaactcagggccgggggacagggggatgcacactygccggggggcctttgacacagctctgtggctcctcccgacaacctgggtaggatgttatgatcagccccatttgacagatgagggatctgaggcacaaaa

SEQ ID NO: 556270 - DNA, 201 bp, Homo sapiens
tttggggccaagatgtgtgtgcacccggggtcgtggccattcactcccaggcaggggtgagggtggcctggcccaggaggccaggaaggagggccctgtcygcctccacctctgggtgcaccccctgcctaccaccctcccttctagagagcacatcgcctgaccggggagaagtggggccgtggttcgagggagggctgg

SEQ ID NO: 556271 - DNA, 201 bp, Homo sapiens
tttgggaggctgaggcaggtggatcacaagatcaggagtttgagaccagcctggccaacatggtgaaaccccatctctactaaaaatacaaaaattaatcrggtgtggtggtgcacgcctgtaatcccagctactcaggaggctaaggaaggagaattgcttgaacccgggaggcagatgttgcagtgagccgagatcatg

SEQ ID NO: 556272 - DNA, 201 bp, Homo sapiens
tgaggcacgggaattgcttgaacccgggaggcagaggttgcagtaagctgagatcacaccactgcactccagcctgggcgacagagtgagactccgtctcaaaaaaaaaaaaaaaaaaagaaagatattattgctggaggagaggaaggcaaagaagaaagaagagacgatgttatcccagcactttgggaggccaaggta

SEQ ID NO: 556273 - DNA, 201 bp, Homo sapiens
tcagtgtgcacgtctgtctgtccgtctgtgcttgtggctatgagcgtgtgcctccacccaccccacgacccgtgactactgtgcaagctggccaggaggtrggtggagggcaaggccaccagacctggcttcgcgctgtccactgcctctctcctcccctccctgccgcagacacgcaggacccgctcgccctcctgctta

SEQ ID NO: 556274 - DNA, 201 bp, Homo sapiens
gaacccgggaggcagaggtttcagtgagccgagatcgcgccactggactccagcctgggagacagagtgagactcaaaaaaaaaaggatgggtgcggtggyttacgcctttaatcccagcactttgggaggctgaggcaggtggatcacaagatcaggagtttgagaccagcctggccaacatggtgaaaccccatctcta

SEQ ID NO: 556275 - DNA, 201 bp, Homo sapiens
gtaatcccagcactttgggaagctgaggtgggcggatcatgaggttgggagatcaagaccatcctggccaacatggtgaaaccttgtctgtactaaaatasaaaaaattagctgggcgtggtggcacacgcctgtagtcccagctactcaggaggctgaggcagaagaatcgcttgaaccccacaggcagaggttgcagtg

SEQ ID NO: 556276 - DNA, 201 bp, Homo sapiens
taaaaaaaaaaaaaaaaaaaaaaaaaacacacaaaaattagctgggtgtggtggtgggcgtctgtaatcccagccagctacttgggagtttgaggcaggaraatcacttgaacctgggaggcagaggttgcagtgagccgagatcacgccactgcactccagcctgagggacagagtgagactctgtctcaaaaaaaaaaa

SEQ ID NO: 556277 - DNA, 201 bp, Homo sapiens
cttcatcacccccgagaacgggtccgaggacatcttcgtacatgtgtctgagtgagtcccctccacctccctgttcttggcccctgccctagtgtccccartggtgcctcaaaaatggctctccaggcctctcctctcactggctgaggtctgtattcatggtgccttttctgtcctctgagtaggggctgagggtgcgtt

SEQ ID NO: 556278 - DNA, 201 bp, Homo sapiens
agactgaggctgcagtgagccatgatggtgccactgcactccggcctgggtgacaaagtgataccctgtctcaaaaaattaaaaagtaagagagaaccatsacaaccatttcctgccccattctgcatccttttaggggagctgagaattggagcagagtcccagcatgggctgtggttcatctgccaagaaggctgagtc

SEQ ID NO: 556279 - DNA, 201 bp, Homo sapiens
ctggcctagggaggcttagggccaggctgcccccaaggccaggccacaggattgtctggggcacagggcctgctgctgggctaatacccctcttcctgccygccagcatcgagggggagtacgtgccagtggagggcgacgaggtgacctacaagatgtgccctatccctcccaagaaccagaagttccaggccgtggagg

SEQ ID NO: 556280 - DNA, 201 bp, Homo sapiens
gggagagaggaccgccttgaccagagaaaccccagtgccgcttccagttgctgaaagcagagtgcagcagggacccttgctggtccttcccctggaatgtygggctgggaagggaccggctgggaaaggcagacagttggacctggagcagctgtcttatcctgactctattttttccccagtgtgatggggataattgtg

SEQ ID NO: 556281 - DNA, 201 bp, Homo sapiens
gaggggtcagggccttggccacagcagccgggcctcagcctcctgagagctggcctccgggaccctgcctcatgttccgcattcccttccctcaccctgtmccctgacactgcctcctttctgttcctccgccaccccaagctcatatacagccaagggccttccaacctcccgagcttcttccctctcgatgtcttctct

SEQ ID NO: 556282 - DNA, 201 bp, Homo sapiens
catggcattcagccaatgaaagcctcattttcacttgccctctttggcagcaatgctctggagagggggtctgaactggagggttgctccgtatctccatsttcccttctctctggtctctcgggctgctgggcattgtacagctcctccaagcccacgccctggcagggcccagagagggaaaggccctgtaccagctca

SEQ ID NO: 556283 - DNA, 201 bp, Homo sapiens
tgaggtcaggagtacaagaccagcctggccaacatggcgaaacctcatctctactaaaaatacaaaaattagccagatgtggtggcacatgcctgtagtcycagctactcagcaggctgaggcacgggaattgcttgaacccgggaggcagaggttgcagtaagctgagatcacaccactgcactccagcctgggcgacag

SEQ ID NO: 556284 - DNA, 201 bp, Homo sapiens
ttccatggaaatattacaaggggtagacagagatgagccgtgtcagtgtctgtactagcagagggcaggaccactgagcgtccggaggggagacgagtgtytgggtgtccctgggaacctggcttgtctcgacccctctggggggctcctcttggctctgacctccattctcccagactcacccccactcatgcccaccca

SEQ ID NO: 556285 - DNA, 201 bp, Homo sapiens
tagtctcagctactcagcaggctgaggcacgggaattgcttgaacccgggaggcagaggttgcagtaagctgagatcacaccactgcactccagcctgggygacagagtgagactccgtctcaaaaaaaaaaaaaaaaaaagaaagatattattgctggaggagaggaaggcaaagaagaaagaagagacgatgttatccc

SEQ ID NO: 556286 - DNA, 201 bp, Homo sapiens
aggccaccagacctggcttcgcgctgtccactgcctctctcctcccctccctgccgcagacacgcaggacccgctcgccctcctgcttacccgtccccacrgtgactgagctgcgagagcctgcgctgggctcactccctggcctccgcccctgagctgtcccgtgtcagtccctggcccggagccaggctctctgtgcta

SEQ ID NO: 556287 - DNA, 201 bp, Homo sapiens
ccagaagttccaggccgtggaggtggtgctcactcagctggccccccacactccccacgagacgtggtctggccaggtcgtgggctcctaggctgagtggytcacaggccagctggccgggggttggggagccacacagggtgaacgggcagcagccggctccatgccccactgccctggctgatgagtccttcggtggcc

SEQ ID NO: 556288 - DNA, 201 bp, Homo sapiens
tccacgagccagagagagacagagcgcggacgccgcaggaggcagtgcctggaccccagctgcccaggagaggtgaggggctagatggggcctgaggacastgtgccagaaactgtggctttggccaggccgaaggagagaggtacaacgtgaaggtgggggctggatcagcccagttcagcttacagatagggtgttggg

SEQ ID NO: 556289 - DNA, 201 bp, Homo sapiens
caggccacaggattgtctggggcacagggcctgctgctgggctaatacccctcttcctgcccgccagcatcgagggggagtacgtgccagtggagggcgaygaggtgacctacaagatgtgccctatccctcccaagaaccagaagttccaggccgtggaggtggtgctcactcagctggccccccacactccccacgaga

SEQ ID NO: 556290 - DNA, 201 bp, Homo sapiens
acagcctggacccttccctcagaagcctggccgatgggtgcttttggggagcctctcagcctctggcaggggaggaggactgacacggaggcacacaggcytctcactgccgaggccagccttccttcctgctctgctctctcagtgccatggagaggcaggaagaggggcctgagggcggaaggggtttggggctcccat

SEQ ID NO: 556291 - DNA, 201 bp, Homo sapiens
gtggtgagcgtctgtgatcccagctactcgagaggctgaggcaggagaatcacttgaacccgggaggcagaggtttcagtgagccgagatcgcgccactgractccagcctgggagacagagtgagactcaaaaaaaaaaggatgggtgcggtggtttacgcctttaatcccagcactttgggaggctgaggcaggtggat

SEQ ID NO: 556292 - DNA, 201 bp, Homo sapiens
cctcttctcttagtgtgtcccttcccaattgcattcttttccacctttctttttttttttttgagatgaagtctcgctttgttgcctaggctggagtgtartggtgcaatctcggctcactgcgacgtccgcctcccaggttcaagcgattctcctgcctcagcctcttgagtagctgggattacaggcgccaccacgcct

SEQ ID NO: 556293 - DNA, 201 bp, Homo sapiens
aatctggcaggagggcagataatacgggacatactttgtagactatgttaagagcaaaaatgtcctaactataaaaatagtgggaaaccattgaaatgggtttttttttttttttttttgagacagagtctcgctctgttgcccagactggagtgcagtggtgcaatctctgctcactgcaagctccgtctcctgggttca

SEQ ID NO: 556294 - DNA, 201 bp, Homo sapiens
agaagtggacggacttgagaatcttttggtgagagaagcaaaccttgtgactggtcaagatgagagaaggcaatcttaactcaggtttctggctaagccarttgtagggtactcaacttagaaagcccctctgagtaattcagaagatcactgtgttgtttaactattgcttgtacttccttactgacaacccagttggta

SEQ ID NO: 556295 - DNA, 201 bp, Homo sapiens
cacacccagctaattttttgtattttcagtagagactgggtttcaccatgttggccaggctggtctggaactcctgacctcaggtgatctgcctgcctcakcctcccaaagtgctgggattacaagcattagccacctcgcccagcctgaaatgattttaaatgtgaaggatacttgccagtggcaggtcctgaaccatct

SEQ ID NO: 556296 - DNA, 201 bp, Homo sapiens
gggaaatattactgcatatttgtatgctgatggaatgatctaaaaaaagagggaaaaattgatgtttcaggagagatgatggcaggaggggaatccttaaytaagcaagaagcgttcagattcaggatcaaatggaaaagtgagccttagatagccgtgtgggcaattcattctgtgcaataggagggaaggcagaggata

SEQ ID NO: 556297 - DNA, 201 bp, Homo sapiens
cagtctggagtgcagtggtgcaatcatagctcaccacaacctcgaactcctgggctcgagatcccttctcctcagccttctgagtagctgggactacaggygcacgccactatgcccagctaatttttttttttttgttttgttttttttgagacagtcttactgttgctcaggctggaatgcagtggtgcgctctcggct

SEQ ID NO: 556298 - DNA, 201 bp, Homo sapiens
gcagcagttttagttagaggagatataagtcatggaaattggagtccagttttcatgtcaggagacaaaagtgcaagtgcctactgtgtttgggcaagttrcttttctgaacctgtgtttcctcataatgatatattctggtttcttaggatttattgaaatattcactcatcaaatatttattattattattattatttt

SEQ ID NO: 556299 - DNA, 201 bp, Homo sapiens
agttattttccattatttaaaaaatagccagccatcagagtgggtataaagtgatatttcattgtggttttgatttgcgtttccctcatgattaatgattwgagtttttttttttttttttttggacaggggcgtagtctgtcacccaggctggagtgctgtggcacggatattggttcactgcagccttgacctcctggg

SEQ ID NO: 556300 - DNA, 201 bp, Homo sapiens
aagtgtgtttttggaatcagatacattcagcttcaactctcagccctttaccagcttatccgctgtttgcgttaagtttcctcatgtggaacatcgtgatrtgaatacctacgacgcagagttgttgtgatactagatactaaagtgtttggattgtattgttacacacttgtcctaaactgaggctgaatataaactgaa

SEQ ID NO: 556301 - DNA, 201 bp, Homo sapiens
tggctctatgttctgatttattttactgggaattcatttgggatttggttctctttcagtgttgctgctttgaccagtaagagaagcttagtccttatgcyagagagttctgcagaagaaatcactgtttgtcctggtaagtaccccactgtgattttactgaatttctgatacctatttaccttttcatgcctattaatt

SEQ ID NO: 556302 - DNA, 201 bp, Homo sapiens
cgggcagtagtggagctggatttgaatcccagcagctggactccagtgttctttcatttaatcactacatcgcaccgagatatagaaatgacacccggaaraagtgaaaagtttatgcttctgtctttattgttttcctgtcaagggaggcagtgccttgtagtcgaatgaaagtgtgtttttggaatcagatacattcag

SEQ ID NO: 556303 - DNA, 201 bp, Homo sapiens
tttaagaaaacagttacatttaatatactatcaaaaataataaaatacttaggaatatgtttgacaaaagaaataaaaaacttctctgagaattataaaayattgttgaaagaaattaaataagacctaaataaatggaatggtatttcctgttcatggtttagaatacttaatgttgtgaagatggcagtattcaccaag

SEQ ID NO: 556304 - DNA, 201 bp, Homo sapiens
atcctcgttttctctaattatttgccccgaaaataacccccagcgcactccttggagatccctatcgtcctagacgatttcgcccccgcagggccggcgcstttccaggtgcttaggcagcgccgcaggcttctcgagcgccacagccggcgggctggtgccctgccgctcagttaacggggcgcgagtcccgggcagtag

SEQ ID NO: 556305 - DNA, 201 bp, Homo sapiens
ctcttggaaccccactggagaaaggctgagatggtaggagccataggaattaataaacaagaggtcagggaactgagaggctggagtactggatggatcatatcttgggttgaagttacaaaaactgcaacttcatatggttcagtctaatatgtagatattgaaatcaccaagaatggtggcaaatggggatgagaatcc

SEQ ID NO: 556306 - DNA, 201 bp, Homo sapiens
ttaaatgcagttatctcattcaacaggttaggaaattgttactcaggttacagaacttgcctaaggccacacagctagtagaggcccaacctggacacctrttgtccaactctaaagccagtgagtgcccttcaccacaaggcaatactgattatttgtatcttaacagtgccaagccacagttctaagtacaactcctta

SEQ ID NO: 556307 - DNA, 201 bp, Homo sapiens
aagagctcttttttcccctggaatctattgatacagtttaattcagcaagtatttattagcatttaatctgtcctagactctgctgaggatgctgaagagaaaaaaaaaaaaaagaaacaaaataaaacccagagtctctgaattcagaaagttgcatggtgtagaaggaagactgacatataagtgaataggaacagaaa

SEQ ID NO: 556308 - DNA, 201 bp, Homo sapiens
tctgtccaactctgaaactcctgcctcttatgcagtacttctgtctctcatgtagtagggaattaatgttttttgcattaattgataaaccttgaaaggtrtactagtctagcttttctcttaaggcagcattttgcttgcattcttctggataattaagtatttgagagacttatttctgctattttaaacatcttcaga

SEQ ID NO: 556309 - DNA, 201 bp, Homo sapiens
acaggatgccatgtcttgtctctacaaaaaaaaaaatacgttgcataggatggtctcaaattcctgacctcaagtgatcctcctgccttggcctcccaaartgttgggattacaggggtgagccactgcgcccagctgaaaggaaacattcttgtcttgctccttgtcgaaaggagaaagcattcagtcttgtacctttaa

SEQ ID NO: 556310 - DNA, 201 bp, Homo sapiens
actgggaaggatggatgtacttttggggccttgtaattagagatcaggaagagcaagtcttggcttagagatgaaagataaagcagcagctccatattctmgggttaccgacaaaggagtcactgtacacactaaaatggggaagccattgtctgtcatgccagaagaaagagacccctctctgtgaatggggtgattttg

SEQ ID NO: 556311 - DNA, 201 bp, Homo sapiens
caagatgagagaaggcaatcttaactcaggtttctggctaagccagttgtagggtactcaacttagaaagcccctctgagtaattcagaagatcactgtgktgtttaactattgcttgtacttccttactgacaacccagttggtatttatttagcagcaactataacgcagatactgttctgcaagctgagggtacagta

SEQ ID NO: 556312 - DNA, 201 bp, Homo sapiens
tgttatgcaaggaatgagctggaaaacacttgattaaataacctccaagatcctttaagagactattttataaacagatgtcttttggtgtgagagacaaygtatttgtgtatcatttgggctaaagccatttatacccactagaattgggaggtggtattagtgtagtgaggaaagactggttgtattaactgttctgag

SEQ ID NO: 556313 - DNA, 201 bp, Homo sapiens
ggggaatacgacaagccccaagtataccttctaaaggaacaggcacagtaaactagatgtgcagacattattgcttccttctattgttttgtgcatcattmatatgttacctttatcttagtgtcgcaacctgtgatcctgagcgtttgtgcgtagtatttagggagcagtagagtggattggttaagaccattgcaggga

SEQ ID NO: 556314 - DNA, 201 bp, Homo sapiens
gctgagtctgttggacactaatgctcaccgtctgtgggtttaggggattggggatctgtgctacctggataggcctgatgagaagcagtgcctagagcacrgaagcaaaagatcagtgagaagtgctatgattaccaacactactaccaacattattattttttcttttatatcacagatgcagacatcaagtcttcagaa

SEQ ID NO: 556315 - DNA, 201 bp, Homo sapiens
tttgtttatgtatagcctgtgactgctttcctgctaacagtgcagagttgagtagttgtgacagagaccatatgtcctaccaagactaaaatatttactckctgtctccacagataaagtttgctgacccctggactagataaatgcttcacaacctaagttactcgtaaccctgctaaattatctgttgtggggatttca

SEQ ID NO: 556316 - DNA, 201 bp, Homo sapiens
caaaggtaatgatggattcctagggcattaaggaagcacagaagagaaatgcttttctgaatttcagtttttcatatgtaaaatggaggcagaaatacctrttttactctgttggtttgcaggtgaaattagataaagaatataaaacgtggtagagatttgtcacaagtagaagtatcatgtggaaagtcatattatttt

SEQ ID NO: 556317 - DNA, 201 bp, Homo sapiens
cctgctgcagagtgactgacgacagatcctgctccataatgtcaaaatggcctctggattgttttctcaggaagaaacagaatcttctaaatgggaatgarggaatagaatattattaccatagtcatcctaacatacagaagaagcccttagttaaggctgatttcatacccatccatgactgcagacgagactgttctt

SEQ ID NO: 556318 - DNA, 201 bp, Homo sapiens
actcccagcactttgagaggccgaggcagaaaaatcacttgagtccaggagtatcaagacccgcctgggcaacataggagaccctgtctctacaaaaaataaaaaaaattattagagtgtggtggcgcctgcctatagtctcagctactcaggtggctgaggcaggaggatcccgtgagcccaggaagtggaggctgcagg

SEQ ID NO: 556319 - DNA, 201 bp, Homo sapiens
tcgaactcctgggctcgagatcccttctcctcagccttctgagtagctgggactacaggcgcacgccactatgcccagctaatttttttttttttgttttkttttttttgagacagtcttactgttgctcaggctggaatgcagtggtgcgctctcggctcactgcaacctctcccttctgggttcaagcgattctcgtgc

SEQ ID NO: 556320 - DNA, 201 bp, Homo sapiens
agaggcaaaagcacatcttaaaactgtgttttcttccttttttcttattggataggaatgagaagtgttacctctgtaaatccctggtcccatttagagaktatcagtgtcatgtggactcctgtctccagcttgcaaaggctgaccaaggagatggacctgaagggagtggaagagcatgttcaactgtggaggggaagt

SEQ ID NO: 556321 - DNA, 201 bp, Homo sapiens
agtcttctcaatatgtagtgctgggacaactgaatatccacttgcaaaaccatgaagttggaccacttgtttatactacgtatgaaaatagatcaaagacytaaatgtaagtcataaagcttttataggcagctacagtggtacacactggtaagtcccatctacttgggaggctgaggcaggaggatccttagagtccca

SEQ ID NO: 556322 - DNA, 201 bp, Homo sapiens
tcggctcactgcaacctctcccttctgggttcaagcgattctcgtgcctcagcctcccaagtagctgggattacaggtatgtgccaccatgtctggctgatttttttttttttttttttttttgggaaacagagtctcgctctgtcgcccaggctggagtgcagtggtgtgatctcagctcactgcaagctccgcctcccg

SEQ ID NO: 556323 - DNA, 201 bp, Homo sapiens
atggtggctcacgcctgtaatcccagcactttgggaggctgaggtgggcggatcacctgaggtcaggagttcgagactagccttaccaatgtggagaaacyccgtctctactaaaaatacaaaaaaaaaaattagccaggcatggtggtgcatgcctgtaatcccagctactcaggaggctgaggcaggagaatcacttga

SEQ ID NO: 556324 - DNA, 201 bp, Homo sapiens
tcatgttcttcaggttggtaacaaggaagatgctgagaaggaagtagctatttctaccttctcatccagtaaccaggtatcctgcccgctatgtgaccaaygctttccacccacaaagattgaacgacatgccatgtactgcaatggtctgatggaggaagatacaggtaaagacccagcaggacagccaaactcttactt

SEQ ID NO: 556325 - DNA, 201 bp, Homo sapiens
catctcatcagaattgaccttgtcagattttcaattacctagaataaatggtttgatggattagactctttgctggtgaacagcgtccatgtgacatagtygcctctgtaaacctgtgagtgcaaagtcaaaaaaagatcagatgaacattacttctttctggtgatagctgtggagattgaccatgcatagactgatctc

SEQ ID NO: 556326 - DNA, 201 bp, Homo sapiens
attctcctgcctcagcctcctgagtagctgggattacaggcatgcaccaccacgcctggctaattttgtatttttagtagagacagggtttctccatgtckgtcaggctggtctcgaactcctgaccttaggtgatccgcccgccttggcctcccaaagtggtaggattacaggcgtgagccactgtacccagactttttt

SEQ ID NO: 556327 - DNA, 201 bp, Homo sapiens
gtgattcttgtgcctgagccactcgagtacctgagattacagacatgtgccaccatgcccagctaatttttgtatttttagtagagatggggtttcaccaygttggccagggtggtctcgaactcctgacctcagatgatctgccgaaagtgctgggattacaggggtgaaccactgcaaataagtatttattgatcccct

SEQ ID NO: 556328 - DNA, 201 bp, Homo sapiens
aaatgggtttttttttttttttttttgagacagagtctcgctctgttgcccagactggagtgcagtggtgcaatctctgctcactgcaagctccgtctccygggttcacggcattctcctgcctcagcctcctcagtagctgggactacaggggcccgccaccacgcccggctaatttttttgtaattttagtagaaacgg

SEQ ID NO: 556329 - DNA, 201 bp, Homo sapiens
ctttagcctctcaagtagctgggactataggtgtgcaccaccacacctggctaatttttaaaatttttttgtagaggtggggtctttctttttttgaaacrgagtctcgctctgtctcacaggctggagtgcagtgacacaatctcggctcactgcaagctctgcctcccaggttcacgccattctcctgcctcagcctcc

SEQ ID NO: 556330 - DNA, 201 bp, Homo sapiens
agggtcttgctatgttgatgaggctggtctcttaacttgtgggctcaagccatcctcctgctttggtctcccaaaatactgggattataggtgtgagccastgtgcccagcctttttttttttttttttttggagacagggtcttgctctgttgcccagttgcctaggctgaagttcatcggcatgatcatagctcatggc

SEQ ID NO: 556331 - DNA, 201 bp, Homo sapiens
ccagacttctctagacattgacaagtaagtaggtatgctgcattcacggagctcttgtataacataccatcgtttggactgaataaaaagaccaattcctrtcttaccctgtatttctttggcctgccaattgcttcattgcttggatgcctgaattttcttttcttttcttttcttttcttttcttttcttctcttctct

SEQ ID NO: 556332 - DNA, 201 bp, Homo sapiens
tgttgatgaggctggtctcttaacttgtgggctcaagccatcctcctgctttggtctcccaaaatactgggattataggtgtgagccagtgtgcccagcctttttttttttttttttttggagacagggtcttgctctgttgcccagttgcctaggctgaagttcatcggcatgatcatagctcatggcagtctcaaacac

SEQ ID NO: 556333 - DNA, 201 bp, Homo sapiens
ttattttttgtatttattgatcattcttgggtgtttcttggagagggggatgtggcagggtcataggataatagtggagagaaggtcagcagataaacacrtgaacaaaggtctctggttttcctaggcagaggtccctgtggccttccgcagtgtttgtgtccctgggtacttgagattagggagtggtgatgactctta

SEQ ID NO: 556334 - DNA, 201 bp, Homo sapiens
agattaacagcatcccaaggcagaagaatttttcttagtacagaacaaaatggagtctcctatgtctacttctttctacacaggcacagtaacaacctgatctctctcttttccccacatttcccccttttctttttgacaaaaccgccatcgtcatcatggcctgttctcgttggtcgctgtctcttcggagctgttggg

SEQ ID NO: 556335 - DNA, 201 bp, Homo sapiens
cgtatacctatcaagacacggagcattaatatcaccctggaagattccctcatatctcttcttcacccctccccctaaaggcaaccactgttttatttctrtaaaattctgcttatatgatattctgcagtttgatattagtagaatcataccagtatacttttatgtaatctttcactcagcataatgtttttgagattg

SEQ ID NO: 556336 - DNA, 201 bp, Homo sapiens
gattaacagcatcccaaggcagaagaatttttcttagtacagaacaaaatggagtctcctatgtctacttctttctacacaggcacagtaacaacctgatctctctcttttccccacatttcccccttttctttttgacaaaaccgccatcgtcatcatggcctgttctcgttggtcgctgtctcttcggagctgttgggt

SEQ ID NO: 556337 - DNA, 201 bp, Homo sapiens
agctatctcaaccctcataaaccacaagtactccttcagagcaacctacatacacttctctgctcttttgtaggggcagtaggtttcaaaggaaaaacagyggcaagccccagtccagtccattgtgatcataacatttaatagaattaccgtatagtcctaaccatctatcaatatcaagtctctcccttcaaattttct

SEQ ID NO: 556338 - DNA, 201 bp, Homo sapiens
acagcatcccaaggcagaagaatttttcttagtacagaacaaaatggagtctcctatgtctacttctttctacacaggcacagtaacaacctgatctctctcttttccccacatttcccccttttctttttgacaaaaccgccatcgtcatcatggcctgttctcgttggtcgctgtctcttcggagctgttgggtacacc

SEQ ID NO: 556339 - DNA, 201 bp, Homo sapiens
gccttcagttgtcttctaacaacttttgttcaacttttctgtggaacatttcctcatgtcagctccactaggttgcattgataaagttgctgtatgatgtrgcatatgaaatggcagcctgactgcagtgtacgtctgcatgaattctcagtgcttttacacttcccatcttgttcctctcttaatattgactttgccttc

SEQ ID NO: 556340 - DNA, 201 bp, Homo sapiens
aaattatttatattcatgacattgcttatagtttttaactttcacaaataatacaaaatgtacttaattctttttccttgctgtgggaatattttttgacrgaggaaaccaaagtgacaggagcagcttataaaacaaaatgcaaagacatttaaggaaggatgttttggaacagattctgggcactaggtcttatcagct

SEQ ID NO: 556341 - DNA, 201 bp, Homo sapiens
tgaagtagaagcagtgctgatcctgcagaaaggtctaatcggtgtgaacagaagtggcactgatgtggggaaaagagtattcaaatccatgtggaattgasagggtgggtgggcagcaagtagaaaggataaagaagtcattgcctccatgctgttccattcctgtaaaaaaaaaaaaaaaaaaaaaaagcattgctattg

SEQ ID NO: 556342 - DNA, 201 bp, Homo sapiens
gtgggcattatgaaaggaaatggtgggcagttggagaatgacaaatgtaacttgaatcatgtgggttaacatttgtatgaattatgtgggtctacattatrgaacagcatttttttcaactcaaataattattggtgagtgttactaaaataattatttgtgtgtttaccccccttgtggtatataggactcttggatgca

SEQ ID NO: 556343 - DNA, 201 bp, Homo sapiens
ctggagggacttgagcaaagaataatatttaagcaaaggatcactccactctggttgctactatgtggacagtagattactgggttgtgggacaagggtgraagctgggaaaatagagtcaatattttgtttttggcactatgataaagtagaagaaatgtcagttttagaactaggcagctcagctgtaatatttcctaa

SEQ ID NO: 556344 - DNA, 201 bp, Homo sapiens
tgcctttgcatttactttctggaaaatgtatctaaggccaattgtgttagacacctagggagaataaaagcccccatttactcattcaatacgtatttatygtatacctactatataacagatacagtgagcagaatatacaattaacagaatataagtccctgttctcatggagcttattttctagtagtgggaggcaga

SEQ ID NO: 556345 - DNA, 201 bp, Homo sapiens
catttctgaaaagtgcaggccttgtcctgtgttctgtgtgtagtgtgatactcagactgttgcagtagaaatcactgtggaactattatgacctctctctsagtatgactctgtgctccccatttagctaaagattggataactcaattcattcattgtgttaaaacaaacagagtgaaagttatgtcttattcttctgta

SEQ ID NO: 556346 - DNA, 201 bp, Homo sapiens
cttacagtaataacagtccttttgtgaaattgaaaatgtgtccttaaggtgctgttgatatgcaaaatgtgaaacccagcaggcacagcacactgatgcartgaggattgtgccttacaatgtggtagagatcagtgccctcaagtttttgaggcagattctagtccttcatttgaatctcaacactcccacttacttgtt

SEQ ID NO: 556347 - DNA, 201 bp, Homo sapiens
atagaataactttgcgacgtaaaaacacaatttgagacatatccaggggcccagaggcaaaagcacatcttaaaactgtgttttcttccttttttcttatyggataggaatgagaagtgttacctctgtaaatccctggtcccatttagagagtatcagtgtcatgtggactcctgtctccagcttgcaaaggctgaccaa

SEQ ID NO: 556348 - DNA, 201 bp, Homo sapiens
ggcactcaccaccaagcccggctaaattgtctattttcagtagagacagcattttgtcgtgttggccaggctggtctggaactcctgaccccaagtgatcygcctgccttggcctcccaaagtgctgggattacaggcgtgggccaccttacctagccaatagtttgttctaataatagcctttaattgagactggtctct

SEQ ID NO: 556349 - DNA, 201 bp, Homo sapiens
ggtgtggtgtggtgtggtatggtatggtatggtatggtatggtatggtatggtgtatggtatggtatggtgtatggtatggtatgctatggtatggtatgstatggtattaattttttgagacgatctagctctgtcacctaggctagagtgcagtggtgctatctcagctcactgcagcctcaaccctcctggctcaggc

SEQ ID NO: 556350 - DNA, 201 bp, Homo sapiens
accctgtatttctttggcctgccaattgcttcattgcttggatgcctgaattttcttttcttttcttttcttttcttttcttttcttctcttctctttctyttttttttttgagatgaagtttcactcttcttgcccaggctggagtgcaatggcgtaatctcagctcaccataacctccgcctcctgggttcaagcgatt

SEQ ID NO: 556351 - DNA, 201 bp, Homo sapiens
tggtcttataggtaataattgtcagaaactagatttgcctgactcataagatccccttggttttaagaagctaaaaaaaattttccaaagcatgctatctkggacatcaaagatagcacaaaggtgcttcctcctgaaagtaatgtcattaccaacagtagattagagcagttactaagcagaaacttttatctttgaaac

SEQ ID NO: 556352 - DNA, 201 bp, Homo sapiens
agatacttgccttagttcatgtttatatccccagcttctaataaaatgtatctgagacagcaataatagctgtttgtttagtgcctaatattatgtgccartcattgtgctaggtgccttgtttgtaagtctcactgtagttgatttaaggtagttattctttcgttttttaagtaaggaaactaaagagaaattttatgt

SEQ ID NO: 556353 - DNA, 201 bp, Homo sapiens
tatcctaaactttaggtgaaaataggcatgtttgtttttttaattatgaaaacacaaaatgaaaattaatgggattttaacttttttaaattacagagacmcagctaagttcctctgaaacttttgaccttgaaagagaagtctctccaggtagcagagatatcttggatggagtcagaataataatggcagataaggagg

SEQ ID NO: 556354 - DNA, 201 bp, Homo sapiens
gtacatagatgaatgagcatggctgtgttccaataaaaccttacttagaaaaataggcagctgacaggatttggcccatgagctgtatctagttttctggsccctgaactagactacaagggaccccatcttagattttcatattactgatagcgagtataatgcctgggacttgatgttcaattatttgttgaattaata

SEQ ID NO: 556355 - DNA, 201 bp, Homo sapiens
ttgttgttatattaagtgatatgtgtctacagcagaagttggcaaacttttttttgtgtgtgtgagacagtgtctcactctgtaactcaggctggagtgcagtggtgtgatcatagctcattacaaccttgaactcctgacctcaagtgatcctcccgcctcgtcttcccaaagcattgggattgcaggcatgagtgactg

SEQ ID NO: 556356 - DNA, 201 bp, Homo sapiens
tcggcctcccaaagtgctgggattacaggcgtgagccaccgcgcccggccaataatttttttaaacaattacactgagaaggtttgagatatgctttagcytaaggcagagatggaggtgccttataactaacttactagtgctttgattgcatctaaagaccaaggctagtcattataaaattctgttaaatggacacta

SEQ ID NO: 556357 - DNA, 201 bp, Homo sapiens
tataaggaagcgaggtatctcagaagttttttttttttttgagatggagtctctctgtgttgcgcaggctggagtgcagtggcatagtcttggctcactgyaagctccacctcccgggttcacgcattctcctgcctcagcctcctgagtagctgggactacaggtgcccgccaccacacccgcctaattttttatgtatt

SEQ ID NO: 556358 - DNA, 201 bp, Homo sapiens
gcgctccccacttcccagacggggtggcggccgggcagaggcactcctcacttcccagacggggaggccgggcagaggcactcctcacttcccagacgggrcggccgggcagaggcactccccatttcccagacggggtggcggccggcagaggcgctcctcacatcccagatgggccggccgggcagaggcactcctcac

SEQ ID NO: 556359 - DNA, 201 bp, Homo sapiens
aaaaaacactatcaaaacacaggggaatacgacaagccccaagtataccttctaaaggaacaggcacagtaaactagatgtgcagacattattgcttcctyctattgttttgtgcatcattcatatgttacctttatcttagtgtcgcaacctgtgatcctgagcgtttgtgcgtagtatttagggagcagtagagtggat

SEQ ID NO: 556360 - DNA, 201 bp, Homo sapiens
cccagacagggcggccgggcagaggcactcctcactttccagacagggcggccgggcagaggcactcctcacttcccagacggggcggccgggcagaggcrctcctcacttcccagacggggcggccgggcagaggcgctcctcacttcccagacggggcggccgggcagaggcgctcctcacttcctcccagacggggcg

SEQ ID NO: 556361 - DNA, 201 bp, Homo sapiens
agccagaagtggtcattctgaatctttaaaaaaatttttttaaatttattttttttttagagacaggatctcactctgtcacccaggcttaagtgtagggrtatggtatgatcatagctaactgcagccttgaactcattggctcaagtgattctcctgcctcagcttcccaactatgccccacgacgcctggctaatttt

SEQ ID NO: 556362 - DNA, 201 bp, Homo sapiens
aaaagcaagttactgtccagccaggtagtcggacacggaccaaagctggcagaggaagaaggagaaaattctgaatttctagggtccaaaagttgacaaamccattagtaggaggggtgggccatgttcattaagccatagtggtccctagttcattgttgagcaagttttagccctgcagttttcaccaccagcacctac

SEQ ID NO: 556363 - DNA, 201 bp, Homo sapiens
tatttcttgttttgcaacaggaaccaaaggaggaaaatgggttgcagaaaacgaagacaaaacagtcgaatagagcaaagtgtttggccaaaagaaaaatygcacgtatgttttcattttgttgataatggtttgggaattgtaatagtcatagaactgatacattttggactagttgattatgttgcattcttaggtctc

SEQ ID NO: 556364 - DNA, 201 bp, Homo sapiens
cagacggggcagccgggcagaggcgctcctcacatccaagacgatgggcggccaggcaggggctcctcacttcctagacggggtggcggccgggtagaggygctcctgacttcccagacggggtggccgggcagaggggctcctcacatcctagacgatgggcagccaggcagagacactgctcacttcttagatggggtg

SEQ ID NO: 556365 - DNA, 201 bp, Homo sapiens
caggggctcctcacttcctagacggggtggcggccgggtagaggcgctcctgacttcccagacggggtggccgggcagaggggctcctcacatcctagacratgggcagccaggcagagacactgctcacttcttagatggggtggcgggcgggcagaggctgtaatcttagcactttgggaggccaaggcaggcggctgg

SEQ ID NO: 556366 - DNA, 201 bp, Homo sapiens
gatcttagcttgctgcagcctggaagtcttgggttcaagcgatccatctgctccagcctcctgagtagctaggaccatgcctggctaatttaaaaaaaatkctttttaattaaaaaataaataaatttttttgggggttaaggacaggatctctctacattgcccaggctggttttgaactggcctcaagcgattctccca

SEQ ID NO: 556367 - DNA, 201 bp, Homo sapiens
agcgagactccgtctgcaatcccagcacctcgggaggccgaggcgggcagatcacccgaggccaggagctggagaccagcccggtcaacatggcgaaaccyggtctccaccaaaaatacaaaaaccagtcaggagtggcggtgcgtgcctggaatcccaggcacttggcaggccgaggcaggagaatcacgggagcctgag

SEQ ID NO: 556368 - DNA, 201 bp, Homo sapiens
cgggaggctgaggcaggagaatcacttgaactcgggaggcagaggttgcagtgagctgagattgctccattgcactccagcctgagcaagaagagtgagaytatgtctcaaaaaaaaaaaaaacaaaaaacagtcaagactgtatcattacttgtcagggatgtttatagaaggcattttcatatgagtaggaggttgatc

SEQ ID NO: 556369 - DNA, 201 bp, Homo sapiens
tcaggagtggcggtgcgtgcctggaatcccaggcacttggcaggccgaggcaggagaatcacgggagcctgaggcagggaggttgcagcgagccaagatcrtggcagtatcagcaacagagggagactgaagaaaggagggagaggaggagggggagggggagagggagagggctatatttttaatgagtagtagacaagt

SEQ ID NO: 556370 - DNA, 201 bp, Homo sapiens
attatagtagcttcatagcgagtcttaaagtcaggtagcaggtagcataatttctcatttgttctttttcaagattgtggtagatattatttttattattwttttttttttgagacgaattctcactcttgtcccccaggctggagtgcagtggtacgatctcggctcactgcaacctccgcctcccaggttcaagcgatt

SEQ ID NO: 556371 - DNA, 201 bp, Homo sapiens
agagtctcgctctgtcgcccaggctggagtgcggtggcgccatctctgctcactgcaagctccgcctcctgggtttacaccattctcctgcctcagcctcscgagtagctgggactacaggcgcctgccaccacgcctggctagttttttttgtatttttagtagagacggggtttcactgtggtagccaggatggtctcg

SEQ ID NO: 556372 - DNA, 201 bp, Homo sapiens
accatgcctggctaatttttgtagttttagtagagatggggtttcgccatgttggccaggctggtcttgacttcctgacctcaggtgatccacctgcctcrgccccccaaagtgctgggattacacgcgtgagccaccgtgcccggccagattgtggtagatattctagtctttcacggtttcatataaattattgagcca

SEQ ID NO: 556373 - DNA, 201 bp, Homo sapiens
agcagttctcctgcctcagccttccaagtagctgggattacaggtgcttgccactatgccctgctaatttttgtacttttagtagagacggggttttaccmtgttggctaggctggtcttgaactcctgaccttgtgatctgcatgccttggcctcccaaagtgttgggattacaggcgtgagccaccacacctggccagt

SEQ ID NO: 556374 - DNA, 201 bp, Homo sapiens
gtagatattctagtctttcacggtttcatataaattattgagccaacatgtaaatatacgatgtaatttccagttttatccctgataatgtgtgtgtgtckgtgtgtgtgtgtgtgtgtgtgtgtctgtgtgtgtgtatatatatatatattttttttttttgagacagagtcttgctctgttgcccaggctggagtgcag

SEQ ID NO: 556375 - DNA, 201 bp, Homo sapiens
aagttttgttcctctccctactttatagtttatcttagatcatttcttaatagatgacttattctaccatagataaaccataatttattttttgtataaattttttttttttttttttaaagacaaggtctcgctctgtcacccaggctagagtgcaccgatgccatcttgggtccctgcagcctccacctctgggatcaa

SEQ ID NO: 556376 - DNA, 201 bp, Homo sapiens
ttgagccaacatgtaaatatacgatgtaatttccagttttatccctgataatgtgtgtgtgtctgtgtgtgtgtgtgtgtgtgtgtgtctgtgtgtgtgtrtatatatatatattttttttttttgagacagagtcttgctctgttgcccaggctggagtgcagtggcacaatctcggctcactgcaacctctgtctcctg

SEQ ID NO: 556377 - DNA, 201 bp, Homo sapiens
agttttgttcctctccctactttatagtttatcttagatcatttcttaatagatgacttattctaccatagataaaccataatttattttttgtataaattttttttttttttttttaaagacaaggtctcgctctgtcacccaggctagagtgcaccgatgccatcttgggtccctgcagcctccacctctgggatcaag

SEQ ID NO: 556378 - DNA, 201 bp, Homo sapiens
ccaaactctgctcttttaaaaaaggtaaagatagctatgcatataaaattacgcaaaagcctctggcagaaccacatggcttttagtaacttcttagttgwtgttgcagattgtagaattaaggaagtcagcatatagacagacttgatttgctaatcagacaagttcatccaccctggtaaaaatgtcaacttaatttaa

SEQ ID NO: 556379 - DNA, 201 bp, Homo sapiens
aaatatacgatgtaatttccagttttatccctgataatgtgtgtgtgtctgtgtgtgtgtgtgtgtgtgtgtgtctgtgtgtgtgtatatatatatatatwttttttttttgagacagagtcttgctctgttgcccaggctggagtgcagtggcacaatctcggctcactgcaacctctgtctcctgggttcaagcgattc

SEQ ID NO: 556380 - DNA, 201 bp, Homo sapiens
tggtggaatcatggctcactgcagcctcaacctcccaggctcaagtgatccttctgcctcagcctcccgagtagctgggaccacaggtgcatgccatcacscctggctaattttttattttttgtagagatggagtctttttatgctgcttaggctggtcttgaactcctgggctcaagtgattctcctgcgttggcctcc

SEQ ID NO: 556381 - DNA, 201 bp, Homo sapiens
ttttgctatatttattctttctggtaggttgcaagagcaagcactttccctcccagtattaggattcggctgatacatatctgggattctgctgatgtttbtctgtctgtctgtctgtctgtctatctgtctatctatctatatctgtctcctgtttttatatttgccgcccccccgtattacatcataaacgtcatctaa

SEQ ID NO: 556382 - DNA, 201 bp, Homo sapiens
tttattccctccatagtatctaatatagtattgtgcaggtaggccctcagaaaatgtactcttaaaagcaaagtctagcaaactttttctgaaaggaacaratagtaaatattttaggctttgcaggccgtttggtctctgtcgcaactactcaagtctttgccactgctactcaactctgctgttaaagcactaaagcag

SEQ ID NO: 556383 - DNA, 201 bp, Homo sapiens
tattcttatagtgtcttggtatttttgtatatgaaaaaaagtctttttttctgctttagaatagaaaaaagcagctggaataatcttaggaagacgtttgytttttgtttttgttttgttattatttttatttttttatatgtatttttttgagatggagtctcgctctgttgcccaagctggagtgcaatggcatgatat

SEQ ID NO: 556384 - DNA, 201 bp, Homo sapiens
attttttttgagacagagtctcgctctgtcgcccaggctggagtgcggtggcgccatctctgctcactgcaagctccgcctcctgggtttacaccattctyctgcctcagcctcccgagtagctgggactacaggcgcctgccaccacgcctggctagttttttttgtatttttagtagagacggggtttcactgtggtag

SEQ ID NO: 556385 - DNA, 201 bp, Homo sapiens
taaattatgatctttttattctagacaaaattattgtccttttattctagacaaaaggatgccacggagaaagaaaaaagttaaagaagtctccgaatctyggaacctggagaagaaggatgtggaaactaccagttctgtcagtgtgaagaggaagcgtagacttgaggatgcattcattgtgatatccgatagtgatgg

SEQ ID NO: 556386 - DNA, 201 bp, Homo sapiens
tcctgggctggtctcaaactcctgggcttaagtgatccaccagtcttggcctctcagagttttgggattacagcccactctgctgggctacttttacgttkgatgtcttttttttttgtgagacagggtcttgctctgttgcccaggctggagtgcagtggtgtgatcacagtttactgcagcctcaacctcctgggctta

SEQ ID NO: 556387 - DNA, 201 bp, Homo sapiens
tttttttttttatagagacaaggccttgctattttgcccagattgtcattctgtggcttcttaatggtctttttttaaagagcagaagttttaaatttcartaaagtcaaatttatcaatttaaaaaatttctttatgtcctaagaaagctttatttacttagtcacctttttttttttttaaactgagacagggtctcac

SEQ ID NO: 556388 - DNA, 201 bp, Homo sapiens
gttctttcacacgtcgtgacttaaatgaatctcccgtcaagtcttttgtttccatttcagaagccacagattgcttagtggactttaaaaagcaagttacygtccagccaggtagtcggacacggaccaaagctggcagaggaagaaggagaaaattctgaatttctagggtccaaaagttgacaaaaccattagtaggag

SEQ ID NO: 556389 - DNA, 201 bp, Homo sapiens
ctctgatccagaatgaatgtggccaaggagagcaggctagtgagaaaaatgaatgcatctcagaagatatgggagatgaagacaaagaggagaggcaggartctagggcatctgactggcactcaaaaaccaaggatttccaggaaagctcaattaaaagcttgaaagagaaacttttgttggaggaagaaccaacaacca

SEQ ID NO: 556390 - DNA, 201 bp, Homo sapiens
tagttttattggtgatcctgctgagtgaatctgcattggttgatatgtctcctccatagaataactttgcgacgtaaaaacacaatttgagacatatccargggcccagaggcaaaagcacatcttaaaactgtgttttcttccttttttcttattggataggaatgagaagtgttacctctgtaaatccctggtcccatt

SEQ ID NO: 556391 - DNA, 201 bp, Homo sapiens
acagaagttagtgattgtgctggttcctcttagctttatatgactggagacagaggccaggctcccaacctagttttaaaatcttttgtaaaaggaagcctttttttttttttactgtggaaggaaagaagtaattttccctttttttttttttttttttttttgagacagggtcttactctgtagcccaggctggagggc

SEQ ID NO: 556392 - DNA, 201 bp, Homo sapiens
tttccagatacattggtggttttgaaagataattactattttttttattgttgttatattaagtgatatgtgtctacagcagaagttggcaaacttttttktgtgtgtgtgagacagtgtctcactctgtaactcaggctggagtgcagtggtgtgatcatagctcattacaaccttgaactcctgacctcaagtgatcct

SEQ ID NO: 556393 - DNA, 201 bp, Homo sapiens
ccaaggaaaaaccaacatttggttaaacccaaagaagagcctttcttacccatattatgtaattcttggtaagtgataacttaccaagccctcttaataawaaagtttgtccttagccctactttttctcaaatacctacaggcatatggcagctggtacctccatcactgtttaaaggctcacatatcagtcagggaaac

SEQ ID NO: 556394 - DNA, 201 bp, Homo sapiens
gggaaaaggtctcactgtcaccagtctggagtgcagtggtgcaatcatagctcaccacaacctcgaactcctgggctcgagatcccttctcctcagccttytgagtagctgggactacaggcgcacgccactatgcccagctaatttttttttttttgttttgttttttttgagacagtcttactgttgctcaggctggaa

SEQ ID NO: 556395 - DNA, 201 bp, Homo sapiens
ctaatttttttttttttgttttgttttttttgagacagtcttactgttgctcaggctggaatgcagtggtgcgctctcggctcactgcaacctctcccttytgggttcaagcgattctcgtgcctcagcctcccaagtagctgggattacaggtatgtgccaccatgtctggctgatttttttttttttttttttttttgg

SEQ ID NO: 556396 - DNA, 201 bp, Homo sapiens
ttgtataattttttgttttgttttgtttttgttttttttgagacggagttttgctcttattgcccaggccagagtgcaatggcatgatcttggctcaccgsaacctccaccgcccgggttcaagcgattctcctgcctcagcctcctgagtagctgggattacaggcatgcaccaccacgcctggctaattttgtattttt

SEQ ID NO: 556397 - DNA, 201 bp, Homo sapiens
tattaattttcctctgactcttcaaacctactctctggaggtttgtatgtaattgatacgtgtatgtacatgtctcaacactcgtatgcgtatacacatayaggtgtttttaatggccattggcttttattctcaatcttttctctccttaggggtaatttagttttgaaattaacatgactttttttgtcttcttgattg

SEQ ID NO: 556398 - DNA, 201 bp, Homo sapiens
atagtggtgaaaatgaaaagaaatggagagcttaaagagaggtataggaggtgaaatcagttgcacataaggatgaattggatatgaaaaatgagggaaaragttaaagataacatcttggttctgtacagggctggaaggtgtgtactagctttcaagtctgccccaactcttttctcagggctctcaaatttgtgtgtg

SEQ ID NO: 556399 - DNA, 201 bp, Homo sapiens
tctctccaggtagcagagatatcttggatggagtcagaataataatggcagataaggaggtgaatattttcctctatattttttctcagtggtttctttcygttggcagtcctctctctgatgcaacgttgacattggctgaaaagatttaggtggcagggggttttagttttgggggcccttatgttagggagagatttt

SEQ ID NO: 556400 - DNA, 201 bp, Homo sapiens
tacctaggaatgaaatggctgggtaatgtagtagatacatgcttattttttaagaaactcccaaactgttttccaaagtggatgtaccactttatattccttttttttttttttttttttgagatggagtttcactcttgttgcccaggctggagtgcaatggcatgatctcggctcaccgcaacctctgcctcccaggtt

SEQ ID NO: 556401 - DNA, 201 bp, Homo sapiens
ctcttcaaggagcttgcattatcaatggtgaaataagcatttccccaagaaattaattaaaagatgacacaagtgaataattgtgtacccaagtaaatgtycctgacaatgggagaaaggagagctgcagtgaataaggatgagatcccagaaagagtgggcttagccttggctttgcaggctggttaggtctggataaac

SEQ ID NO: 556402 - DNA, 201 bp, Homo sapiens
ataacatcttggttctgtacagggctggaaggtgtgtactagctttcaagtctgccccaactcttttctcagggctctcaaatttgtgtgtgtgtgtgtgygcgcacgcgtgcacatagatcccgctgagcagggttatgtaggaagcttgggcctattgtggtctctgctgtgcatttcaacagcctctgaccattctgg

SEQ ID NO: 556403 - DNA, 201 bp, Homo sapiens
ccctatcttatccatatggacaggcgcccacccatgcgtctgtttataggctccccacaagggtcgcattccattcccagagctatgaacatctttttctrggataggaatcttggtgatgtgaaacctccctgactgcacgtccattcataggctctctacagggggaagcacatcacgcgctgttgactcgttctagca

SEQ ID NO: 556404 - DNA, 201 bp, Homo sapiens
gctcagatgctcagatcagccatgtattcctatgtcaggaagagattgcactccatgagcagtcagggaaaaccagaaggttggatgaaggaagccattcrtaattaagtttttgttagaaaagagattcaatttatgtgggcagatttttgctgtagggcagtttggaattgttttttatttttgttgcatggaaagcaa

SEQ ID NO: 556405 - DNA, 201 bp, Homo sapiens
aaacatttaaataggatggaaactactctgtgtgagaggttttcccagtgcattacgcttctccagtcttcccccatactcatctctgctgccaagtactrctcatgctatactcttagatttaaggattaccttaagttttttgtttgtttgtttgtttgtttgtttttgagacagagtctcattctgtcgcccaagctg

SEQ ID NO: 556406 - DNA, 201 bp, Homo sapiens
ccgcgctcccaacgtgtggcggctcgcgacccccggcaacccggagaaggtctacagagcggcctgcgccagcgagtgagtacccgccgcctgcgcacagmtccgcccacccctccctgcctccttttcttcctcagcgggtccgcggcccgctactctccgggaggggcgcttcccgacgccaaggtaggcctctcccga

SEQ ID NO: 556407 - DNA, 201 bp, Homo sapiens
tcttaaggtccctgtgcccccaagctttcaaagcaattttgacaagtttggtacccagactgtcaagattttaaattaccttgtcagtgatttttcttcasatagatcaagacgatggatgtgctgaaataaaatggcaaataatatctgaaattgaggattttcaaggacactgcccaaaatgttacctgtgaaataaat

SEQ ID NO: 556408 - DNA, 201 bp, Homo sapiens
gaaatgattttaaatgtgaaggatacttgccagtggcaggtcctgaaccatctttttatgccatttgcctccctgttttaaaaaagggtttagtatagtgrtctagtacaacactttgcacatagacattcagcatatgctgtgaaattaaattgagccatttacattttagaaagagaaagtcttatgaacggtggcctc

SEQ ID NO: 556409 - DNA, 201 bp, Homo sapiens
atcctcccgggcgtcgggcgagcgccgagctccctcagccgtggtccgcgccgcctcacgcctcggggcgccaggcccgcgctccttcccgtgccgggttrctgttttgttgtgtgatcctcgttttctctaattatttgccccgaaaataacccccagcgcactccttggagatccctatcgtcctagacgatttcgccc

SEQ ID NO: 556410 - DNA, 201 bp, Homo sapiens
tgctgggattataggcatgagccaccatgcctggctagaacagaagttttaaactttgatgtggtccatttttttctcttttatggttttttttctttctrtgtcctaagaaatctttgactacgctaaggttatgaagatttccacctattttcttctggaaattttatagttttagctttagcatttagatttctgatc

SEQ ID NO: 556411 - DNA, 201 bp, Homo sapiens
ataaggataagtttttgttatctccattttactgatgatgaaattaatattagagaactttagcacttgcattgtcaggcagtaagcagcagagccaaggyccagagctagcattcattactgtgttctttctgccttccatgtgtagagctgggacacacaggggaatgtttgagaagaccgtggaagcctcagtcggtt

SEQ ID NO: 556412 - DNA, 201 bp, Homo sapiens
ggctggtggccacctaaagaaaatcctcctgttccacgcattggtctctccagtctccagattcctgcaacagaatgactggcttacatgacagttatacttttttttttttttttttaaagaaactgccagttttccaaagtggttatgccattttacattcccattagcagtatatgagaggttcattatattctgcat

SEQ ID NO: 556413 - DNA, 201 bp, Homo sapiens
tgttacctctgtaaatccctggtcccatttagagagtatcagtgtcatgtggactcctgtctccagcttgcaaaggctgaccaaggagatggacctgaagrgagtggaagagcatgttcaactgtggaggggaagtggcagcagaggctgaagaacccaaaggtatgtgtagagtgttttgggaaaggccacctaaccctc

SEQ ID NO: 556414 - DNA, 201 bp, Homo sapiens
ggaagaattgcttgagtctaggaggttgagattgtggtgagccgtgttggcctcataaagtgctgggattacagcatgagccactgcacccggccaagaatttttttttttttttttgagatggagtcttgctctgttgcccaggctggagtgcagtggcacagtcttggctcaacccctgtctctggggttcaaatgatt

SEQ ID NO: 556415 - DNA, 201 bp, Homo sapiens
tagagctgtggcccccacaccttttctcttctatgaacacgtgtgatctgggctgtggaagttgtattttagactctgacatgaagtaaccttttcatctrtttttctctgttacaggaaaaaggccacagtgaaggccgactccttagtttcttggaacagtctgagcacaagacttcaggtgaggaccccaggaccagt

SEQ ID NO: 556416 - DNA, 201 bp, Homo sapiens
gatctctctacattgcccaggctggttttgaactggcctcaagcgattctcccacttcagcctcccaaagtgctgggattacaggcatgagccactgtgcytggccttttatttctttctctattttattttttgttttcttgattattttgtttgcgtttcttattaaattttagggtggggtgtagggttggtgtattt

SEQ ID NO: 556417 - DNA, 201 bp, Homo sapiens
ctgtggaaactgttttgctttttttcacttaatgtctgtgttaggtcctccagagacatggaaccaataggataggcggatggatggatggatggatggayggatggacggatggacggatggacggacagaaggacggacagaagggtggatggatggaaggacagatggacagacggatggaatttattaggggaattg

SEQ ID NO: 556418 - DNA, 201 bp, Homo sapiens
accctagcctgggtgacagagcgagaccttgtctcaaaaaagaaaaaaaacttgtaggtaaattataatatgtagtcaagaaaagcaattatctaaattgrtgtttaaagaactaggatacatgactatattattgatactgaaatttcaccatggagaatgagatttgtatatttatatagttgtttttttttttttttt

SEQ ID NO: 556419 - DNA, 201 bp, Homo sapiens
ggtttttaaccttttcctgctgctataacagaatatcttagactgggtaatttataaacaatacaattttttttgttcacagttctgaagtctggtaaatstaagatcaaggtgcctgatgagggcttgcactgtgcttaaaagatgggaccttcttgctgtgtcttcacatggcagaagggtaaaaggggcaaacaggtt

SEQ ID NO: 556420 - DNA, 201 bp, Homo sapiens
aagataggtactttgttttaggtagaagagatgctcattcaaagttgcacatggatagatttagatatacaaaataatgtaaaatgaactaagatacttamcatctaagaaactcctgaatcattgtataatatgaagcattattttgtgatatgaaccactactttctaaggaatttgttttagactatattttcctttc

SEQ ID NO: 556421 - DNA, 201 bp, Homo sapiens
aaccatggaagtcagaaaatgaattcattgtttgcttacttctcccagttatgatacatagctggtaccactttagatgcaggggacagaaattgacttayaacatttggtgggtgccttagggcattaggcttactcctctcttggaaccccactggagaaaggctgagatggtaggagccataggaattaataaacaag

SEQ ID NO: 556422 - DNA, 201 bp, Homo sapiens
ttgactcggagacaaaaagaggccaagaccaagagtgacagtgggacagctgcccagacttctctagacattgacaagtaagtaggtatgctgcattcacrgagctcttgtataacataccatcgtttggactgaataaaaagaccaattcctatcttaccctgtatttctttggcctgccaattgcttcattgcttggat

SEQ ID NO: 556423 - DNA, 201 bp, Homo sapiens
gtcttccgccagtgcttcttctttcctaaatttgtgagaattgtttttttcttgcttgccttcaaagaaccctaagtgatacattcaccaaaccaaacttkcttccttatgatgactagactacagctcctgccccacagccaccagcatgccactttctcagatgtcagcagcagggctcagctcttctgggctccttcc

SEQ ID NO: 556424 - DNA, 201 bp, Homo sapiens
tgcagagcctgctctttaagcttctgttccttctctcaacaacccagtcttccgccagtgcttcttctttcctaaatttgtgagaattgtttttttcttgyttgccttcaaagaaccctaagtgatacattcaccaaaccaaacttgcttccttatgatgactagactacagctcctgccccacagccaccagcatgccac

SEQ ID NO: 556425 - DNA, 201 bp, Homo sapiens
ggcggggctgcgggaggctcgcgcccggggacgtccaggccgggggtgggtgccgcggggcagccgggcgcggggtaattaacgcgctgcaaactccggckgccaagccgggaaggggcgggatgcctccgcccgccagcccgcccgcggccgcccgccggattagcggctctttgttcggggcctgttaacaagttcctg

SEQ ID NO: 556426 - DNA, 201 bp, Homo sapiens
tgtggggcctgtgccgcatctactagtggccggggcagtcattgtgtttggcttcggggaggccctgccctggggtgggccagggggggcaggaggtgtcrgctggggccaggccaggctgctgacggcccccctcccctccacagccatctcagcttctttgcctccaagcccagccccacagccatgatcctcaacctg

SEQ ID NO: 556427 - DNA, 201 bp, Homo sapiens
tcgccccacaccacagcttcccatctgcccacgctcaccaacaccacagcttcccatctgcccacactcgccccaacaccacagcttcccatctgcccacrctcaccaacaccacagcttcacatctgcccacactcaccaacaccacagcttcccatctgcccacacctgccccaacaccacagcttcccatctgcccac

SEQ ID NO: 556428 - DNA, 201 bp, Homo sapiens
ccatagcctttcttggcccctgcatgccccattggtcaccctaacccactgctaactcagccctcagcccacctcattcccttgggagggggcttggggggaggaagttcccctgcatcctttgtctgctgtccctgagccttcacctaggctgagctgtgggggcctcctgatctctgccccccatgcacttagctgagt

SEQ ID NO: 556429 - DNA, 201 bp, Homo sapiens
tgattgaatgtctctgagcctcagtttgtcacctgtaaaatgagaatcttggtagcacctaattcgtaacgttgctgtgaggatgaaatgagaagttctckacaaatgtacatagcacaaaccacaaagataaaagttcctatcaaattaaacatgtgcttaccatatgccccagcaatccctctctctagagaagtccca

SEQ ID NO: 556430 - DNA, 201 bp, Homo sapiens
aaaaagaaaagaaaatcatcaaaatgtggaaacagcccaggtgaggggacagatgctgtggtgcgtccacacggtggggcactgcccagcaggggaaggaygctgccgtgggttcaggccactcagagggactctaaagtactgtgtaccgctaaagaagccagacacgaaggactccattctgcatgatcccattgcggt

SEQ ID NO: 556431 - DNA, 201 bp, Homo sapiens
tcctggcctccctggtgcggggggccagagttgtgtgtggttggtccgccagtttccccttcttccttaaactccatagcctttcttggcccctgcatgcyccattggtcaccctaacccactgctaactcagccctcagcccacctcattcccttgggagggggcttggggggaggaagttcccctgcatcctttgtctg

SEQ ID NO: 556432 - DNA, 201 bp, Homo sapiens
gtgcgtccacacggtggggcactgcccagcaggggaaggacgctgccgtgggttcaggccactcagagggactctaaagtactgtgtaccgctaaagaagycagacacgaaggactccattctgcatgatcccattgcggtgacattctagaaatggcaaaacgccagtgacagaaagcagaagggggttgggagggggga

SEQ ID NO: 556433 - DNA, 201 bp, Homo sapiens
agtgctcgctgctcttattattattagtgtgaccattattattatccacggaagattctctggacgggtggcttgtttgcatccctgacccaccgggctgygccctggagcccccctgctcaggctggccaaggagggcgcctctcctcccactcggcggctgggcccggccgtggtgtgtgatgggccgtcttgcccagc

SEQ ID NO: 556434 - DNA, 201 bp, Homo sapiens
acaagaaataaagtttgttatgaattattctacttggggctaattataggcacagaggagaggattatttacagagacaggaggcaggggacggggaggasgaggaggaggggccctgagacatggaaacgagtggagggctggagagagttcagcaaacggggctttttgaataaaagctgtgactaaactcaggtccat

SEQ ID NO: 556435 - DNA, 201 bp, Homo sapiens
atgtccacccacggtgtcccagctgagcgagaagggacacgggatgatatgagctggccgtgggcgcccactgcatacagcaggttggtgagggaaggtcygatggggacttagccgcactgtgccacaccgaaattcacagcccaccgtggctcggaggagcatgggctggtgtgaccctggcttccaattcttcaacag

SEQ ID NO: 556436 - DNA, 201 bp, Homo sapiens
ctacatcacacccaggggtctgtggaccacagttcacagcctcctattgttccagttggaacagaggactcagcagggctatggcccaatcactcaccccragacccctctccaccctccagcactgcttgcagtggatcgtggaagtcggtcctcggtgccagccacagactccctgcccagtgctcatgacagacagca

SEQ ID NO: 556437 - DNA, 201 bp, Homo sapiens
agactgcaggtgaggaaaggggctgagcctacaagagcagcatgtgccagcgggtggctgggggcagcctggagccaggggcttctcctgcccgccactcygcctgtgggctgctctgccctctctctgggtctctccacagaccaggagtgaaggggccaccctaggcagatctgaaattctagagggaaaaagcggtgg

SEQ ID NO: 556438 - DNA, 201 bp, Homo sapiens
ctatggcatcagagggaacagcattctgggcagagggaacagtagatgcaaagcccctgaagcaggactgagcagagcaccgggagagccaacaaagggckgggtgctgcatggtgagtgaaagggacagtggcctgtggcatctgaagtgacaggagaaaaggaggtggaaggcccacattcagcaggtttctggccagg

SEQ ID NO: 556439 - DNA, 201 bp, Homo sapiens
tggaaccagagacagaggggtcttttggcaaatggctaggcggaggtggaagccaggttgtaggaggtggagccaggaatgggattaaggtgggtgggggragctgagtagggagggggaaagagaaaagggacccagaccagcagggacaagacagcaaagagtttaatgaatggttttcttgtccatgatgggggacag

SEQ ID NO: 556440 - DNA, 201 bp, Homo sapiens
actttgcgaggcgggacgcggggggctcttcttgctgctgcgcagcttccccgcgcgctctcccggaagcctgggttctgccaagtccagaagcagctgtsagcccgcggggctggcgagtgtagacaccccacgcctccgggtgggggaagtttgctggttgcctgggcccggagcagggctgggggtttggatcaaccc

SEQ ID NO: 556441 - DNA, 201 bp, Homo sapiens
agctgcatgtcgcccacgtgagcacgtgtgaaggctgtgggttgacatgtgtgcccgggtaaccaggggggttggcatggtgtgtgcagcattggcatgtstgtgccctgatgaacgtgtgtgatgaccagcatgccgcacgtgtgtgacggctgtgtgcagttgcacaggtgagcgtgtacagataagggggcacaggta

SEQ ID NO: 556442 - DNA, 201 bp, Homo sapiens
ggcatctgttgaggcctggcccaaggttgcccagggagtcggcaggtgggcacaggtgctgcaggggctgacgcagagcctgccccaaggcatcaactctrcccctgggcctgcgggaggagctgctgaaggccatggggtggggaggggctggccctacttctttgggactcccttccccctgtgccccacaggcactgg

SEQ ID NO: 556443 - DNA, 201 bp, Homo sapiens
tccctctatgcccaggggctgcaattgtgaatgcgcattggtggggggatcactgcagccccaggggaggccaggctggctgaggacctgttcaaagggcrgctgggggttgtgggagctgagggtgacccccaccccatcctctcaggggacctgctggttgggcagggatcagactactctgggggttttacctctgcc

SEQ ID NO: 556444 - DNA, 201 bp, Homo sapiens
ggggggcaagaggaagaggaggcatccagcagcccctccaggcccctactgaccagctgaccagcagcccccacgctgcggcctcctccaggctggtttcstagagcacccctccccgcctcatttccacgttagcaccaccgccccccgcacccagatccctccgcccctcagcctggtgtgacatcctttagggaccct

SEQ ID NO: 556445 - DNA, 201 bp, Homo sapiens
ctatgcccaggggctgcaattgtgaatgcgcattggtggggggatcactgcagccccaggggaggccaggctggctgaggacctgttcaaagggcggctgsgggttgtgggagctgagggtgacccccaccccatcctctcaggggacctgctggttgggcagggatcagactactctgggggttttacctctgccagtgc

SEQ ID NO: 556446 - DNA, 201 bp, Homo sapiens
tcgtcaagaacaagccagtgctgcttgtgtgcaaggccgtgcccgccacgcagatcttcttcaagtgcaacggggagtgggtgcgccaggtggaccacgtratcgagcgcagcacagacgggagcagtggtgagccgcatggggcgccaggcagggccaatccgggggaggcgagtttcggcccccccagaggagcctgca

SEQ ID NO: 556447 - DNA, 201 bp, Homo sapiens
gtctttggaggtcagaccctctggcccaaagctctacggcagcccctttatggacatttctgtaagtgactccggggagtcaggcctcaggtaacaaagtrtaatgaatggaaggtctaccctgcctgcccggggccttcaggagatagaaatcaagcggcccttgggccccctggagtttcctccaggctggaggttgcc

SEQ ID NO: 556448 - DNA, 201 bp, Homo sapiens
tcctccaagacgttggagcagaggcaagccagccgacgggagggcatccagcccaggagataggttattcaagacccaccccacctgcagggaccatggcrtggcagagagtagaaggagcaagggagaggggagctggagcaggacgggagggcagtgggggctcaggcagtggttccagaaccaccaactttgtagcac

SEQ ID NO: 556449 - DNA, 201 bp, Homo sapiens
cccagaaggaggtcatgccgaccttgaagccagtcggcctgtgggctgctctgagaggctggagcgcatctcagcaggggcggacgtgcttgggagcaggrtggacgcagagccgcgcacatgctctgccctcccagagcttccacagggagcgcccccgtcaagcctaggagagagcagcacagccccttgccgccctcc

SEQ ID NO: 556450 - DNA, 201 bp, Homo sapiens
ctggagggcttccctgaggaggggctttgtactgggccccaaagaatgagccagtttggctgcggcattaaggggaagagcatttctggcggtgagagctkggcaggggggactcaggccgtgaagagagctgtgtgtgttgagtgtcagcagaggctgggcagagtgacttggaggggagaagggcggagagggagggag

SEQ ID NO: 556451 - DNA, 201 bp, Homo sapiens
ttgttccttgtctgctcctgtgggagtggcattgaagggtcctcctgccttctggggagtctcaccccgtattcttgccaggtgaagcagaaaggacaggmtaagctttggaggcagtcagggtcaacttccaacccaagcctcgtgtccttggacaagcaacttgcagtccccagcctgtttccacattgatagaatggg

SEQ ID NO: 556452 - DNA, 201 bp, Homo sapiens
tctaagtctgaacagaggccgcttgcccagtccagtgtgtgtgtctcccaggaaggttcccagagggggcctgcctgtggctgggagaaatccccatcccrgattctgtaaccatcctgtccaaatttcaggaaattccctgattccttcccaacagttccagatgctccagagcctccgactcatcgctccctgtgctgg

SEQ ID NO: 556453 - DNA, 201 bp, Homo sapiens
cacagttcacagcctcctattgttccagttggaacagaggactcagcagggctatggcccaatcactcaccccgagacccctctccaccctccagcactgyttgcagtggatcgtggaagtcggtcctcggtgccagccacagactccctgcccagtgctcatgacagacagcagcagttccacacttgggtctgcagcag

SEQ ID NO: 556454 - DNA, 201 bp, Homo sapiens
gggtgggggaagctgagtagggagggggaaagagaaaagggacccagaccagcagggacaagacagcaaagagtttaatgaatggttttcttgtccatgaygggggacaggtgagcatccttggagacccctgggctattgaggcatcttatacagcttggtgacatctcctccaggaagccctcctggatgccccagatc

SEQ ID NO: 556455 - DNA, 201 bp, Homo sapiens
ccgctggttgcaggaggcttcagctgcctcacccaggggcaggagctgaggctcagaccacgggcacacaagatgggcagccgcggcctgggccctgcgcrtctcgggattgcagcttctcccctctcggcctctggaagggacagtgccctcaggcctcagctgagaggacacctggtgctgacaggtacatcctgctac

SEQ ID NO: 556456 - DNA, 201 bp, Homo sapiens
aggaaccattaacagacttgtccacccaagggagaaaaagtacccagttcagaatgttctggaggtctcccacccctaacccccaaggcagagaggatgaagggagtggagggcccctccccagatctccttatcagatgccctaagtcatattgaaagatagctggtgcccaaggcccctctcctatacaaggaccctgt

SEQ ID NO: 556457 - DNA, 201 bp, Homo sapiens
tggggcagctcctgactttccagctggcctgtcttgaggggcaactgtggaacaggtgcactgtccttactcggccttatggtgcgtgtgcctggggaagracccggatggaaatggggagggtgcccccagagctactctaagtagagttacctccatccgtgggcagtcgggtgatctgccccggctctgccatggtcg

SEQ ID NO: 556458 - DNA, 201 bp, Homo sapiens
tttgaaagaattcagaggcgtgcaccccagcttgctgctggctgcatggcaccccgttgttacctccaggcaggttcatacctgagttgccacctggactstcatggctcttactgtgccacccagatctgtagtctccggtagagattgaaacccaggtcatggaacctgccactccccaccttgccctcctcaccacag

SEQ ID NO: 556459 - DNA, 201 bp, Homo sapiens
tcaactctgcccctgggcctgcgggaggagctgctgaaggccatggggtggggaggggctggccctacttctttgggactcccttccccctgtgccccacaggcactgggcacatgtggacgcccaggcaggctggccctgccgtgacccgggctcctcccgcgctgccttttgcctccgttgcaacagcctccggtgaaa

SEQ ID NO: 556460 - DNA, 201 bp, Homo sapiens
gcctacaagagcagcatgtgccagcgggtggctgggggcagcctggagccaggggcttctcctgcccgccactccgcctgtgggctgctctgccctctctmtgggtctctccacagaccaggagtgaaggggccaccctaggcagatctgaaattctagagggaaaaagcggtggtcattcagtcacgcaacaaacactcc

SEQ ID NO: 556461 - DNA, 201 bp, Homo sapiens
gcagtgagccgagatcgcgtcattgcactccagcctgggcggtaagagtgaaactctgtctcaaaaaaaaaaaaaagaaagaaagaaagaaagaaaaaaagaaaagaaaatcatcaaaatgtggaaacagcccaggtgaggggacagatgctgtggtgcgtccacacggtggggcactgcccagcaggggaaggacgctgc

SEQ ID NO: 556462 - DNA, 201 bp, Homo sapiens
tagaggcgaggccagcagggcctcaaatgccagccagaggcacaagtggcacgtcatcctgtggcactccccatgcccggacatccgagcacctgtagagyggggaacccaggccctggtggacctactgggggcaaacctccatggggaggctgcccaggggctccccaaggcctgctgggcaccagcatccagggctca

SEQ ID NO: 556463 - DNA, 201 bp, Homo sapiens
ccgcaactgtaccagtgacctctgtgtacacagtgagtcctctctgccctgaggtcctcttctgtttgcctggattggccttgcccagccctggggaggtsggggctgagggagctattctcctgccaaaggctgtagcctctccaggctcaggacccactgagatccccctcatccttagcatacctgcacatgggccca

SEQ ID NO: 556464 - DNA, 201 bp, Homo sapiens
gaattgacccactgacccctgcccacaggatgtgctgcacctgggcgaggaggcgccctcccacctctactactgccagctggaggccagtgcctgctacrtcttcaccgagcagctgggccgctttgccctggtgggagaggccctcagcgtggctgccgccaagcgcctcaagctgcttctgtttgcgccggtggcctg

SEQ ID NO: 556465 - DNA, 201 bp, Homo sapiens
caacttgaaagcaagcttcagagacggggactgtgttgtcttgcttgcgctggatcccggtgcccggaacagttcctggcacacagcaggcactcaataaktatttgttgaatggatacgtttcatgtcttggaagaaggtggcatccgtcccaggctcagttcagtccaaggctccttgcccaggggtctcttgcctccc

SEQ ID NO: 556466 - DNA, 201 bp, Homo sapiens
ctccctgccccgaggcaccagcaacatgacctatgggaccttcaacttcctcgggggccggctgatgatccctaatacaggtaggaaggaccccagggggytctgagagctccacttccctcctggaggaggacgggacagccggacgttcctctcgtgcccctcggtgtcccgtgacagatcagcaaggaaagggggtgg

SEQ ID NO: 556467 - DNA, 201 bp, Homo sapiens
ccgaggccaaactttgcgaggcgggacgcggggggctcttcttgctgctgcgcagcttccccgcgcgctctcccggaagcctgggttctgccaagtccagragcagctgtcagcccgcggggctggcgagtgtagacaccccacgcctccgggtgggggaagtttgctggttgcctgggcccggagcagggctgggggttt

SEQ ID NO: 556468 - DNA, 201 bp, Homo sapiens
tgtttagaagcagattgctgagaaggtgagaaccgaagtgccagcttggcctcagagccccagctagaaaccctgggcagcccaggttcacacacacaccmgcccaggcccactggcccggggtccctccccagggctggcacctgctcacacttatgggcaggtacagacatagctgtacccagacactgctcccaggaa

SEQ ID NO: 556469 - DNA, 201 bp, Homo sapiens
ccctcacatcaaagatggggtagggccgggtctgcagcccccgcctcaggcactgccctccaggagcttgtggggctgaagggcacccctcaccaaggcaytgcgtggagctggcacattgaggacacacttggccctcactcatgcaagtgagagggaggagaggaggtggcaggacagaaggggagggaaggcaaaggg

SEQ ID NO: 556470 - DNA, 201 bp, Homo sapiens
ccccaggagaggctggggtctgggctgcaggagtgtgtgagccgcggttcagcctggctaccccgagtgccccctgggagaagggaagactgtggcgtgcrtgctgcagggcccgggggccagcaggcacgagcatggcctcccccaggccttctctcccagctcagccacagcccacccgtgtccagctcacagcccctc

SEQ ID NO: 556471 - DNA, 201 bp, Homo sapiens
ctgtgggtgtggcaggtggagggcgacgggcagagcttcagcatcaacttcaacatcaccaaggtggacgggaggggctgccgcaccgccgtgacgtgctyccactaccaactccccaccagcccccaaaacgctcctgccctgcctgccctgccacccactctccctcccgcctgtccccaggcccacctcctcctagaa

SEQ ID NO: 556472 - DNA, 201 bp, Homo sapiens
ccacctcctcctagaaaccccttggcagcttcctcccagactcagagacagggaggcacaggtgcaaatgggacttggggaggggagtgcaggggacatgrgagcagcaggaggggagaccctggagggcttccctgaggaggggctttgtactgggccccaaagaatgagccagtttggctgcggcattaaggggaagag

SEQ ID NO: 556473 - DNA, 201 bp, Homo sapiens
aggggacatgggagcagcaggaggggagaccctggagggcttccctgaggaggggctttgtactgggccccaaagaatgagccagtttggctgcggcattraggggaagagcatttctggcggtgagagctgggcaggggggactcaggccgtgaagagagctgtgtgtgttgagtgtcagcagaggctgggcagagtgac

SEQ ID NO: 556474 - DNA, 201 bp, Homo sapiens
aggggagaccctggagggcttccctgaggaggggctttgtactgggccccaaagaatgagccagtttggctgcggcattaaggggaagagcatttctggcrgtgagagctgggcaggggggactcaggccgtgaagagagctgtgtgtgttgagtgtcagcagaggctgggcagagtgacttggaggggagaagggcggag

SEQ ID NO: 556475 - DNA, 201 bp, Homo sapiens
gtgtgtgtgtactggcgtgtgtgtgctggcatgtgtgtgtgcgtgtgtgtgcgctggcatgtatgtgctggcatgtgtgtgtgctggcgtgtgtgtgtgcrctggtgtgtgtgtgggtgtatgtgctggcgtgtatgtgccggcgtgtgtgtgggtgtgtgtgtgctggcctgtgtgtatgtgccggcgtgtgtgtgtgct

SEQ ID NO: 556476 - DNA, 201 bp, Homo sapiens
tgcaagcccccttttgtcctccttccccctcctccacacccacccccagccaggagctgccctctctgcccctctgtgctgccgttttgtgtgtgtgtctygtcaccaggataaatgcggctacaaacaatgcggcaggctgggtgctaatttgtcagacgcagtgcgcggctgtgattccgaatacattaacattttcac

SEQ ID NO: 556477 - DNA, 201 bp, Homo sapiens
gatcagggaaatgcaagtcaaaaccacaatgcgataccaccttactcctgcaagaatggccataatcaaaaaatcaaggccgggtgcggtggctcacgcckgtaatcccagcactttgggaggccgaggtgggcggatcacgaggtcaggagatcgagaccatcctggctaacatggtgaaaccccgtttctactaaaaat

SEQ ID NO: 556478 - DNA, 201 bp, Homo sapiens
caaagacctgtctgtgaaagctcttagcagatttactgaaaatcatcaaaatctcacttctgaaaagaaggtatacaaatggccaacaatcatgaaaaaakgctcgacatcactaatgatcagggaaatgcaagtcaaaaccacaatgcgataccaccttactcctgcaagaatggccataatcaaaaaatcaaggccggg

SEQ ID NO: 556479 - DNA, 201 bp, Homo sapiens
gtggggtgggactcctggttcctgaggctgagccccagggcccaaccacgctcagacaggagctcagcttcctgcaatcagttccaccagcccaccccttygttccttgtctgctcctgtgggagtggcattgaagggtcctcctgccttctggggagtctcaccccgtattcttgccaggtgaagcagaaaggacaggct

SEQ ID NO: 556480 - DNA, 201 bp, Homo sapiens
tgggtggtagtaaaatgccagactggtgagggatgagctttaggaagatcttatctagaaaggcagtgagctggacagagaatggccagcaggctttagtytggggagaatgatatggacgaagtctgggggaaggcagctttcctaaggcagggcccaggagggcaacagcaggctggacatgatgcgaaggggagattg

SEQ ID NO: 556481 - DNA, 201 bp, Homo sapiens
agtgcgtggcatggagctcctcgggcaccaccaagagtcagaaggcctacatccgcatagcctgtgagtctagggctgggccctgggggagggcgcacggygggagggtgtcaccaggagaggggacagtaggcttcctggaagaggcggtccggtcagaaaacctcacagccctgcctggatgagtggataaagtgcctg

SEQ ID NO: 556482 - DNA, 201 bp, Homo sapiens
ggtgccagtgcgtggcatggagctcctcgggcaccaccaagagtcagaaggcctacatccgcatagcctgtgagtctagggctgggccctgggggagggcrcacggcgggagggtgtcaccaggagaggggacagtaggcttcctggaagaggcggtccggtcagaaaacctcacagccctgcctggatgagtggataaag

SEQ ID NO: 556483 - DNA, 201 bp, Homo sapiens
ccgtggccagcgcacaagaggcctggagcttgggctcacctgacacctcctctctgcaaccccatcaggagatccccttttatcacatctggaatggcacrcagcggtacttgcactgcaccttcaccctggagcgtgtcagccccagcactagtgacctggcctgcaagctgtgggtgtggcaggtggagggcgacgggc

SEQ ID NO: 556484 - DNA, 201 bp, Homo sapiens
cactctgcccaggccacactggcctccctgctgtcctcaaacaagcccagctgcctcctgccttagggcctcccctgttcccttttccaagcacactctgyagcctggccttggcattcagggcgctgctcagatggcacctgcctgagccccgctccctcgagagccctctcacccgcccctttctgaaagtctgcccct

SEQ ID NO: 556485 - DNA, 201 bp, Homo sapiens
ggaagagtaagctccttgtcagctaccaggtgagggccagggccgtggccagcgcacaagaggcctggagcttgggctcacctgacacctcctctctgcawccccatcaggagatccccttttatcacatctggaatggcacgcagcggtacttgcactgcaccttcaccctggagcgtgtcagccccagcactagtgacc

SEQ ID NO: 556486 - DNA, 201 bp, Homo sapiens
aatcagggtccatccctgaagctggtaggggtcatttccactcaaaccacatagcttactatggaacaagagtggatctccaaagaaaatggggctgttaytttgggaaaagaggagctggagctgggaaagcagtcagcaggtgtccagtcatggagtgtgttctcctgcctctgtgcgtttgcacctgcaggtctctgc

SEQ ID NO: 556487 - DNA, 201 bp, Homo sapiens
cacactcaccccacaccacagcttcccatctgcccacactcacccaacaccacagcttcccatctgcccacactcacccaacaccacagcttcccatctgyccacactcacccaacaccacagcttcccatctgcccacactcaccaacaccacagcttcacatctgcccacactcaccccacaccacagcttcccatctg

SEQ ID NO: 556488 - DNA, 201 bp, Homo sapiens
acttgctctgagtcactgccagccaggtgctgtttttcttcatttctccattttgagtttgggctctctttgcaggcagggagggctgctattgctggggwcagggagagatgtttgctctgcccctctcagcaaccatcccatccctgtccctgaacacggactgccatgctccagggaagctggaaacggcctcctgtc

SEQ ID NO: 556489 - DNA, 201 bp, Homo sapiens
atctgcccacactcaccccacaccacagcttcccatctgcccacactcacccaacaccacagcttcccatctgcccacactcacccaacaccacagcttcmcatctgcccacactcacccaacaccacagcttcccatctgcccacactcaccaacaccacagcttcacatctgcccacactcaccccacaccacagcttc

SEQ ID NO: 556490 - DNA, 201 bp, Homo sapiens
tggaagaagcatcccccctcccccgccattgacacatacaccacccactgcagggacttgggcctgattcagactcattgcttccaatgcacaaggggcarttgtttggaggttctgaagatgaagatttgggctcagcttttcatgcaactgtgtgttgatgatcatctctgactctcaggacatggcacagagtggggc

SEQ ID NO: 556491 - DNA, 201 bp, Homo sapiens
ggcaaataactcctatgtcagaaacaggccttctcagggcgtccagaaggtcagggtcccagtgcccaaggcccacccccttcctgggcactgatgtcagktgcgacaggcagcttcagaccccaggggcccagaaccccaggcacatggaggaggtagtgaaatgggtgagttggcaagctctgtggctgggtttggacc

SEQ ID NO: 556492 - DNA, 201 bp, Homo sapiens
tctgcccacacctgccccaacaccacagcttcccatctgcccacactcaccccacaccacagcttcccatctgcccacactcacccaacaccacagcttcmcatctgcccacactcacccaacaccacagcttcccatctgcccacactcacccaacaccacagcttcccatctgcccacactcaccaacaccacagcttc

SEQ ID NO: 556493 - DNA, 201 bp, Homo sapiens
ctttcatcccagtcttagtggggtattttggggggcccttcatcccagcagcagggcccaggtgagctaggtaagtatttctcttgacctggttcttttcyagctgcagagcctgctctttaagcttctgttccttctctcaacaacccagtcttccgccagtgcttcttctttcctaaatttgtgagaattgtttttttc

SEQ ID NO: 556494 - DNA, 201 bp, Homo sapiens
ctcccaccacagcctatatcaagctaccaatgtgatgtcaactggcttaaaaattctagaaattgtagtgattggctgtcctgagccaggacgagctggcygcatacaccactgctcctgaccaaggtcactcccagccccctctgaagtgaccgcaggcagggagtggacaaaggcatctcaggccttcccctgcaggac

SEQ ID NO: 556495 - DNA, 201 bp, Homo sapiens
caggaatctgctagtcagtgaatgaggtcttctaacttaattccaagcgggcagccaggccaggtcacgtcccttgccagtgggaaagctgtgacatggcrgaaggagcctctgggaaactagggatgagtggggtttgggaagtggcagggcccatgaagctggtgggcccatacctgcctgctgtcctgcaggcccacg

SEQ ID NO: 556496 - DNA, 201 bp, Homo sapiens
gcatacaccactgctcctgaccaaggtcactcccagccccctctgaagtgaccgcaggcagggagtggacaaaggcatctcaggccttcccctgcaggacytattgacttcccaggctgagaggggcagcttacctcctggacaccagactctggttaggccttcccctgcaggactaattgacttcccaggctggaaggg

SEQ ID NO: 556497 - DNA, 201 bp, Homo sapiens
cgggaggctgccgtggtcatccaggcaagaaatgacgaggcgtccctccctgatggcgggcagacagcagggatggagtaagagagatggatgtgggagaygctgcaaagggggagatgttgcatctggatgctgcatgtgggggggcgagggagggggaggaggcaaacatgattcagagctctggagcctggggaagtg

SEQ ID NO: 556498 - DNA, 201 bp, Homo sapiens
gtctcggtgggaaaagggaaaggacggctggatactgacttggactcctctcagctccaccctatttggtcttgagaagtttcttaccctttgagaactgrgctttctggacggatggctccatctcgagggggttggtagtttctctgccgcccattgttttaactgctgaaatactttctcagggcacagcacctccac

SEQ ID NO: 556499 - DNA, 201 bp, Homo sapiens
tcctgcctcagcctcccgagtagctgggactacaggcgcccgccactacgcccagctcatttttgtattagtagagacggggtttcaccatgttagccagsatgatctcaaactcctgacttcatgatctgcccgcctcggcctcccaaagtgctgggattacaggtgtgagccaccgcacccggcccagtcacacagcct

SEQ ID NO: 556500 - DNA, 201 bp, Homo sapiens
cgcccattgttttaactgctgaaatactttctcagggcacagcacctccaccctcctttggcgacctcccgccatggggccctggtgggactgtcagttaygagaacccagcctctccctggagaaagcacctgtcccagctggcgaatggtcccggagatcctgggcacatgattgggccaggctggccacatggcctgg

SEQ ID NO: 556501 - DNA, 201 bp, Homo sapiens
tgaggccagcgcacagggagatcagggacaagcggagggaggaggctgtcccagtggccccgaggccctgaggctctggtccctgcagcttttctcagtcmtgtgagctgctgttaacagccttcctggccctagatccacaaacttcccgctttaacgcccgtgtgagttgggtttctgtgtcctgcacctgaaaggggc

SEQ ID NO: 556502 - DNA, 201 bp, Homo sapiens
ctgtttccacattgatagaatgggtcatgcttgctttctggggttatagtaacagattgatgggcaatgtggagagggcactcagggtgaaccccgacacytagtaggtgccatagcttgtctgtctccttcctctgtgttccttcgcatttgtggggggatggcatgagttaggacagaggtggggacttaagccgcatc

SEQ ID NO: 556503 - DNA, 201 bp, Homo sapiens
ttgagtttgggctctctttgcaggcagggagggctgctattgctggggtcagggagagatgtttgctctgcccctctcagcaaccatcccatccctgtccytgaacacggactgccatgctccagggaagctggaaacggcctcctgtccagggtggggaccaggaaaactaggccccatcctggggtggaggatgctgtg

SEQ ID NO: 556504 - DNA, 201 bp, Homo sapiens
cacgctcctagacaggagacactgccctctccccaccttcgtgcattcaccacacactgggcatgggccctgggactctgggctcagacctgtccctgccstccagggagtcctgtgctattgggggtgactgctagggcgacagaggatggacagagggatggaccaaggggacgggaaggggaagaagagaagcaagtc

SEQ ID NO: 556505 - DNA, 201 bp, Homo sapiens
gtgggtgtgaactcttgtgcacctgagcatgagtgtagaggtaccagcatctgtgcaaatggatgcctttgataaaggatgtgtgtgtgtgtgtgtgtgtrtgtgtgtgtgtgtgtcctgaaatgatgtgcacatcctaagtattctggggtgtaggtctcctgtctaagtgtcttaacagattcatctggaatttgaagc

SEQ ID NO: 556506 - DNA, 201 bp, Homo sapiens
acttcctggtggagcccgaggatgtgtacatcgtcaagaacaagccagtgctgcttgtgtgcaaggccgtgcccgccacgcagatcttcttcaagtgcaayggggagtgggtgcgccaggtggaccacgtgatcgagcgcagcacagacgggagcagtggtgagccgcatggggcgccaggcagggccaatccgggggagg

SEQ ID NO: 556507 - DNA, 201 bp, Homo sapiens
tttggcatacaagtgatttagtcgcctaggtagtgaggacagtgcctgatgggtagtttttccgtcctcaccctcctcccaccctccaccctcaagtaagycctgtgtctgttgtttccctctgtgtgtccatgtgtactcaatatttagctcccacttaagtgagaacatggttttctcttccggcattaattcacttag

SEQ ID NO: 556508 - DNA, 201 bp, Homo sapiens
gtgtgtgtgtgctggcgtgtgcattcgtgtgtgtgtgctggtgtgtgtgggagtgtgtgctggcatgtgtgtgcactggcgcgtgtgtgtgctggcatgtrtgtgtgggtgtgggtgtgctggtgtgtgtgcgctggcgtgtgtgtaggtgtgtgtgtactggcgtgtgtgtgctggcatgtgtgtgtgcgtgtgtgtgcg

SEQ ID NO: 556509 - DNA, 201 bp, Homo sapiens
cagctggagcctgcgcctcaaaaagcagtcgtgcgagggcagctgggaggtgagcagggaactgacccgggctccagaagggaacgtgggctaactgcacrctccacccggccttccaccgctgggtggtcctgagccgcacccccacccctccccagtctccggccacttcttgaagccacagctggccctagggctctg

SEQ ID NO: 556510 - DNA, 201 bp, Homo sapiens
ctagagggcatggctgctagaatgtccttgctagagggcatagctgctagaatgtccttgctagagggcatagctgctagaatgatgtccttgctagaggkcatagctgctagaatgtccttgctagagggcatagctgcagcctggagggtgccccctgggtccaccggataaatgccccccggggccactgtggcgtga

SEQ ID NO: 556511 - DNA, 201 bp, Homo sapiens
agggcatagctgctagaatgatgtccttgctagagggcatagctgctagaatgtccttgctagagggcatagctgctagaatgcccttgctagagggcatrgctgctagaatgtccttgctagagggcatagctgctagaatgtccttgctagagggcatagctgctagaatgatgtccttgctagagggcatagctgcta

SEQ ID NO: 556512 - DNA, 201 bp, Homo sapiens
tagaatgtccttgctagagggcatagctgctagaatgatgtccttgctagagggcatagctgctagaatgtccttgctagagggcatagctgctagaatgyccttgctagagggcatggctgctagaatgtccttgctagagggcatagctgctagaatgtccttgctagagggcatagctgctagaatgatgtccttgct

SEQ ID NO: 556513 - DNA, 201 bp, Homo sapiens
cagcaagcgacagggctgtgaccacatctctgagctggggagtgacaggcagtgagcagtgtttaaggaagattaatctggcagcccatggaggatggatrggagcagggagaggctggaggcaaggagaccagccgggaggctgccgtggtcatccaggcaagaaatgacgaggcgtccctccctgatggcgggcagaca

SEQ ID NO: 556514 - DNA, 201 bp, Homo sapiens
ttgccgggggtgggagggacctgcctgctgccttcggtccccaggaagccccctgcccacccactgttgtgcctggcccgaggcggcgggggaaagagctrtgcctaagccccacgtggtcctgcagcccaagcccctggcccctgggatgctgctgccctgcccttggcctagccctcaggacccaggatgggccactga

SEQ ID NO: 556515 - DNA, 201 bp, Homo sapiens
tagagggcatggctgctagaatgcccttgctagagggcatagctgctagaatgtccttgctagagggcatagctgctacaatgtccttgctagagggcatrgctgctagaatgcccttgctagagggcatagctgctagaatgtccttgctagagggcatagctgctagaatgatgtccttgctagagggcatagctgcta

SEQ ID NO: 556516 - DNA, 201 bp, Homo sapiens
atggctgctagaatgtccttgctagagggcatggctgctagaatgcccttgctagagggcatagctgctagaatgtccttgctagagggcatagctgctasaatgtccttgctagagggcatggctgctagaatgcccttgctagagggcatagctgctagaatgtccttgctagagggcatagctgctagaatgatgtcc

SEQ ID NO: 556517 - DNA, 201 bp, Homo sapiens
tagagggcatggctgctagaatgtccttgctagagggcatggctgctagaatgcccttgctagagggcatagctgctagaatgtccttgctagagggcatrgctgctacaatgtccttgctagagggcatggctgctagaatgcccttgctagagggcatagctgctagaatgtccttgctagagggcatagctgctagaa

SEQ ID NO: 556518 - DNA, 201 bp, Homo sapiens
gctcccacccttgccgagcaggggcaccagctccagctgacgtgggcagccagttctctcctgagagaggcagggccagccagtgggctctggggctcacygcaaatggggttcccacttcagggcttgagtcatccacccagccctgtctgaccaagtcctgtagttcctggtgaccaagcgcccgtcaggaatctgcta

SEQ ID NO: 556519 - DNA, 201 bp, Homo sapiens
caggtgaggaaaggggctgagcctacaagagcagcatgtgccagcgggtggctgggggcagcctggagccaggggcttctcctgcccgccactccgcctgkgggctgctctgccctctctctgggtctctccacagaccaggagtgaaggggccaccctaggcagatctgaaattctagagggaaaaagcggtggtcattc

SEQ ID NO: 556520 - DNA, 201 bp, Homo sapiens
aggatggaaggaatggcggcagccgccctggggaagcagcacccacctctcccagctgagtgaggccgagtgacgccctgtccctacccctcccctgcccmcagggacggaggccttgctcagtatatatgggttcattaatagcttgattaatcacacctcatattttctggtgcttttaaaaataaaacatttgaaagc

SEQ ID NO: 556521 - DNA, 201 bp, Homo sapiens
tctcagggaagcagaggaaggggctgccaccctggcccctcgctgtgttcctcaaccgcgccgtgtggtctgcagggcggacggcgcccgccaccaggcckctgggaggatggaaggaatggcggcagccgccctggggaagcagcacccacctctcccagctgagtgaggccgagtgacgccctgtccctacccctcccc

SEQ ID NO: 556522 - DNA, 201 bp, Homo sapiens
gcaaacctccatggggaggctgcccaggggctccccaaggcctgctgggcaccagcatccagggctcaggggtgcaatgctggctgctgtgccccagcctyctcctccaccccatttcacatccagaacagctctcagggaagcagaggaaggggctgccaccctggcccctcgctgtgttcctcaaccgcgccgtgtggt

SEQ ID NO: 556523 - DNA, 201 bp, Homo sapiens
ggaggtgtcagctggggccaggccaggctgctgacggcccccctcccctccacagccatctcagcttctttgcctccaagcccagccccacagccatgatyctcaacctgtgggaggcgcggcacttccccaacggcaacctcagccagctggctgcagcagtggctggactgggccagccagacgctggcctcttcacag

SEQ ID NO: 556524 - DNA, 201 bp, Homo sapiens
gcctcaaatgccagccagaggcacaagtggcacgtcatcctgtggcactccccatgcccggacatccgagcacctgtagagcggggaacccaggccctggyggacctactgggggcaaacctccatggggaggctgcccaggggctccccaaggcctgctgggcaccagcatccagggctcaggggtgcaatgctggctgc

SEQ ID NO: 556525 - DNA, 201 bp, Homo sapiens
ccccaacaccacagcttcccatctgcccacactcgccccaacaccacagcttcccatctgcccacactcgccccaacaccacagcttcccatctgcccacrctcaccaacaccagagcttcccatctgcccacactcgccccaacaccacagcttcccatctgcccacactcaccaacaccagcagcttcccatctgccca

SEQ ID NO: 556526 - DNA, 201 bp, Homo sapiens
ggaatgccactactgggattcttccagaggaaaagaagttattatacagaaaagatgcttgcacacacatgtttatagcagcacaattcacaattgcacartcgtggaaccaactcaaatgcccgtcaatcaacaaatggagaaactgtgatatatatatatatatatgatggaatactactcagccataaaaaggaatga

SEQ ID NO: 556527 - DNA, 201 bp, Homo sapiens
atctgcccacactcgcccaacaccacagcttcacatctgcccacactcaccaacaccacagcttcccatctgcccacactcgccccaacaccacagcttcmcatctgcccacactcgccccaacaccacagcttcccatctgcccacactcgccccaacaccacagcttcccatctgcccacactcgccccaacaccacag

SEQ ID NO: 556528 - DNA, 201 bp, Homo sapiens
atctgcccacactcaccaacaccacagcttcacatctgcccacacctgccccaacaccacagcttcccatctgcccacactcgcccaacaccacagcttcmcatctgcccacactcaccaacaccacagcttcccatctgcccacactcgccccaacaccacagcttcccatctgcccacactcgccccaacaccacagct

SEQ ID NO: 556529 - DNA, 201 bp, Homo sapiens
cccacaccacagcttcccatctgcccacactcaccaacaccacagcttcacatctgcccacacctgccccaacaccacagcttcccatctgcccacactcrcccaacaccacagcttcacatctgcccacactcaccaacaccacagcttcccatctgcccacactcgccccaacaccacagcttcccatctgcccacact

SEQ ID NO: 556530 - DNA, 201 bp, Homo sapiens
ccacacctgccccaacaccacagcttcccatctgcccacactcgccccacaccacagcttcccatctgcccacactcgccccacaccacagcttcccatckgcccacactcaccaacaccacagcttcacatctgcccacacctgccccaacaccacagcttcccatctgcccacactcgcccaacaccacagcttcacat

SEQ ID NO: 556531 - DNA, 201 bp, Homo sapiens
atctgcccacactcaccaacaccacagcttcccatctgcccacacctgccccaacaccacagcttcccatctgcccacactcgccccacaccacagcttcmcatctgcccacactcgccccacaccacagcttcccatctgcccacactcaccaacaccacagcttcacatctgcccacacctgccccaacaccacagctt

SEQ ID NO: 556532 - DNA, 201 bp, Homo sapiens
gtacacagtgagtcctctctgccctgaggtcctcttctgtttgcctggattggccttgcccagccctggggaggtgggggctgagggagctattctcctgmcaaaggctgtagcctctccaggctcaggacccactgagatccccctcatccttagcatacctgcacatgggcccaggcgcgccccaccacctcccatgcc

SEQ ID NO: 556533 - DNA, 201 bp, Homo sapiens
tcccatctgcccacgctcaccaacaccacagcttcacatctgcccacactcaccaacaccacagcttcccatctgcccacacctgccccaacaccacagcytcccatctgcccacactcgccccacaccacagcttcccatctgcccacactcgccccacaccacagcttcccatctgcccacactcaccaacaccacagc

SEQ ID NO: 556534 - DNA, 201 bp, Homo sapiens
ggaacgaggacctggtggacccgtccctggaccccaatgtatacatcacgcgggagcacagcctggtggtgcgacaggcccgccttgctgacacggccaamtacacctgcgtggccaagaacatcgtggcacgtcgccgcagcgcctccgctgctgtcatcgtctacggtgggccccgggactccctggtcacagggagag

SEQ ID NO: 556535 - DNA, 201 bp, Homo sapiens
gggttagctggtcggagggggcctggctcccagacctgctctgctgctacagcacaagcccaggccagatacactcttctgccccatctatgaaatgggawgaatgactgggcctgggctatcatggagcggatcctgaggcctgggacaggggcaagggtagaagccatgggagggcgcagggagcaggccaggcaggct

SEQ ID NO: 556536 - DNA, 201 bp, Homo sapiens
ggggcaagggtagaagccatgggagggcgcagggagcaggccaggcaggctacttccacccttcgcaggcctcagcaaccccaggatcaaacagtaactgrtaaaatgagcttagtccaaccgatgaagttggactttgatgcatatatattttttctttccatttttttaattcttctttgccattttttaatcaaggtg

SEQ ID NO: 556537 - DNA, 201 bp, Homo sapiens
tggtgtaggtctcgtggttcaagattggcaacagaggaccggagaggagaccaagcagctgggagcccccagaggtgcagctagctgtagggtcagagcgrgtctgggcctctctcagccctctcggaccctgtggaccctgtttccctctgcaagcccccttttgtcctccttccccctcctccacacccacccccagcc

SEQ ID NO: 556538 - DNA, 201 bp, Homo sapiens
tgtttggcctcactcaaatatcgcctcctcagcgaggttccccctgggcctccaacctcaagtagcagcctgtcactctctgctttagcttcttcatggcrtttatccacattggagatgactttcttgacttacttacttgtttatgttctgtaccacccccagttaaaacacacgcttcttgagggcagggactatggc

SEQ ID NO: 556539 - DNA, 201 bp, Homo sapiens
actcaaatatcgcctcctcagcgaggttccccctgggcctccaacctcaagtagcagcctgtcactctctgctttagcttcttcatggcatttatccacaytggagatgactttcttgacttacttacttgtttatgttctgtaccacccccagttaaaacacacgcttcttgagggcagggactatggcctgctcatgct

SEQ ID NO: 556540 - DNA, 201 bp, Homo sapiens
tgctacaatgtccttgctagagggcatggctgctagaatgtccttgctagagggcatggctgctagaatgcccttgctagagggcatagctgctagaatgyccttgctagagggcatagctgctacaatgtccttgctagagggcatggctgctagaatgcccttgctagagggcatagctgctagaatgtccttgctaga

SEQ ID NO: 556541 - DNA, 201 bp, Homo sapiens
atagctgctacaatgtccttgctagagggcatggctgctagaatgtccttgctagagggcatggctgctagaatgcccttgctagagggcatagctgctasaatgtccttgctagagggcatagctgctacaatgtccttgctagagggcatggctgctagaatgcccttgctagagggcatagctgctagaatgtccttg

SEQ ID NO: 556542 - DNA, 201 bp, Homo sapiens
cgccttgctgacacggccaactacacctgcgtggccaagaacatcgtggcacgtcgccgcagcgcctccgctgctgtcatcgtctacggtgggccccgggrctccctggtcacagggagaggcactgcggtgcccctgggcagtgacatgtggctggtggggtgaagagaggccatgaggccaaagccaggtggaccagat

SEQ ID NO: 556543 - DNA, 201 bp, Homo sapiens
tagagggcatagctgctacaatgtccttgctagagggcatggctgctagaatgtccttgctagagggcatggctgctagaatgcccttgctagagggcatrgctgctagaatgtccttgctagagggcatagctgctacaatgtccttgctagagggcatggctgctagaatgcccttgctagagggcatagctgctagaa

SEQ ID NO: 556544 - DNA, 201 bp, Homo sapiens
ggggcctgctccacaggggagcgacagcagctgagatctcacagagacgacagtgtgtaggcacctgtaaagttcagtgccaccgtgagtggttatggaargagttgcgatgagaagggagctgccatagaaaatcagactggcccacctgggacagcctcaatcagagagaggccaagagggagtgtggcagagatctag

SEQ ID NO: 556545 - DNA, 201 bp, Homo sapiens
tgctagaatgtccttgctagagggcatagctgctacaatgtccttgctagagggcatggctgctagaatgtccttgctagagggcatggctgctagaatgyccttgctagagggcatagctgctagaatgtccttgctagagggcatagctgctacaatgtccttgctagagggcatggctgctagaatgcccttgctaga

SEQ ID NO: 556546 - DNA, 201 bp, Homo sapiens
atccgcaggcagtgaggagagtggacatgcctcccagggcccatgtgcaggagcctggtgatggatggctgctgtcacgttggcttcgtggggtgggatawcagcatcgttgagcccaggcaggccaggagggccgctgtctggacagtctcaggctgtccctggtgcccaggtcacatggcctaggctgtctcctgccct

SEQ ID NO: 556547 - DNA, 201 bp, Homo sapiens
tagagggcatagctgctagaatgtccttgctagagggcatagctgctacaatgtccttgctagagggcatggctgctagaatgtccttgctagagggcatrgctgctagaatgcccttgctagagggcatagctgctagaatgtccttgctagagggcatagctgctacaatgtccttgctagagggcatggctgctagaa

SEQ ID NO: 556548 - DNA, 201 bp, Homo sapiens
cagagctgtgcccaccaccccagagctgcacccagggctgagcctagaagagctgtgagatgcagcatagcaggggacttggggcacagactgtggaaccrggctgcctggctgtcccatgtgcagcagtgtggctgtggacatgttattgattgaatgtctctgagcctcagtttgtcacctgtaaaatgagaatcttgg

SEQ ID NO: 556549 - DNA, 201 bp, Homo sapiens
tttaccccacccatgcccttgctagagggcatagctgctagaatgtccttgctagagggcatagctgctacaatgtccttgctagagggcatggctgctasaatgtccttgctagagggcatggctgctagaatgcccttgctagagggcatagctgctagaatgtccttgctagagggcatagctgctacaatgtccttg

SEQ ID NO: 556550 - DNA, 201 bp, Homo sapiens
actacaaatagggtatagtgtatactgctcgggtgatgggtgcaccaaaatctcacagatcacctctaaagaacttacgtaaccgaataccacctgttccycaatcacttatggaaaaataatttttattttttttttacaaaaagggctaggcactgtggctcacacctgtaatcccaacactttgggaggccgaggtgg

SEQ ID NO: 556551 - DNA, 201 bp, Homo sapiens
gccctggaaagggcttctgtgccaccctgccccgcctttgttatgggtccccccacaacgcttgagcagcacagagagctgctggcagtggggtggcctgratggagcttccatttgatccccaaactctgggtgtctgggcaaaggtttccccactggaaaaccatccacctccttcaccggagaagggggatgaaccac

SEQ ID NO: 556552 - DNA, 201 bp, Homo sapiens
cctgcagtgcccagagcggggcttccccataagcacagtgacctcacacctgtctcctcgtctcctgcccacctccacctcccagagctgacccctggccrctgcttcctgactgaagtcctcatctgtctgctctcaacccacccatccccactgctgtacccaccatcttcccaaagcccactcaagctggtccctcct

SEQ ID NO: 556553 - DNA, 201 bp, Homo sapiens
gccctcccacctctactactgccagctggaggccagtgcctgctacgtcttcaccgagcagctgggccgctttgccctggtgggagaggccctcagcgtgrctgccgccaagcgcctcaagctgcttctgtttgcgccggtggcctgcacctccctcgagtacaacatccgggtctactgcctgcatgacacccacgatgc

SEQ ID NO: 556554 - DNA, 201 bp, Homo sapiens
cagctggtaactccaggcagctgtatggaacccccagggcccctctccctgtccctggggccagggctccaatgccagggacctggcaccccttttgttcrtcacattttacccaacacagcggggatactggccttctctgcgcaggaatgctcaaggccagcacgcatccaggtgtgacctgggggctccattccttag

SEQ ID NO: 556555 - DNA, 201 bp, Homo sapiens
tgtgtgccggcgtatgtgtgtgctgctgtgtgctggcatgtgtgtgtgtgggtgttggtgtgtgtgcatgtgcatgtgtcctggtgtgtgtgtgtgtgcgygcgtgctggtgtgtgcatgctggtgtgtgtgtgcgctggcgtgtgtgtgtgtgtgctggcgtgtgcattcgtgtgtgtgtgctggtgtgtgtgggagtgt

SEQ ID NO: 556556 - DNA, 201 bp, Homo sapiens
tcatacggtaactatgttgaacttcctgaggaactgccaaactattttccttaacaactgcaccattttacattctcactagcaataacgagggttccagyttctccatgtcctgattcttatatttgaagtgttaaattcttgcaaacatttttctcatgtcttggtgctcctgctttgctggtgcctgaatctgtgcgt

SEQ ID NO: 556557 - DNA, 201 bp, Homo sapiens
cttccctccctcccagctcttggagtctgcatttggggccttagatttcgcctgttcagtttgaagtggtggaggatagtcaggtggaaacatctaaaagrtaattggaaactgggagtggcactttcagatgcaataagggtgggaagtggagttgagagaccctttcataaggagctgatcaccgacatgcatgagctc

SEQ ID NO: 556558 - DNA, 201 bp, Homo sapiens
tttttcttgcttgccttcaaagaaccctaagtgatacattcaccaaaccaaacttgcttccttatgatgactagactacagctcctgccccacagccaccrgcatgccactttctcagatgtcagcagcagggctcagctcttctgggctccttcctccaagccccgcccctgccctgtgtttctctggcattgcccacaa

SEQ ID NO: 556559 - DNA, 201 bp, Homo sapiens
gaacacacaggtccctgagtgttgggctgaggagcctgggctgcaccccaggaaggggagagacaggttggtcttgggttgtggagagtgctgcatggagscccagtggggcagtggcccctggggggatgccaaaggctggtgatgttcagtggctcgtgaggtggagaggagcaggtgaacacgagagagatttcaggg

SEQ ID NO: 556560 - DNA, 201 bp, Homo sapiens
ccccaggcagcacagtggtgagggggccctggaggggctggcctgggggagatgcaggccagaacacacaggtccctgagtgttgggctgaggagcctggkctgcaccccaggaaggggagagacaggttggtcttgggttgtggagagtgctgcatggagccccagtggggcagtggcccctggggggatgccaaaggct

SEQ ID NO: 556561 - DNA, 201 bp, Homo sapiens
gatatgtggcattgggcaagttacttaatttttctgagcaccgatttcctcactgttgaaatggcgatgagaacgcaaaggatgtggcgtctgaggtggayggagcttagggctgcttgggccacagtgggcacagagctgggtgccaggaggccttcaggacatatttcctggccaagtgcattcccaaatggcattcct

SEQ ID NO: 556562 - DNA, 201 bp, Homo sapiens; identical to SEQ ID NO: 273704

SEQ ID NO: 556563 - DNA, 201 bp, Homo sapiens
acccgtgggctcaaatccactgcagcagacagacgggatggaaatcattaggactccatgttgctctgcacggccgagtgacacgaagaggcaggcggagrgagctgtgaggcttacttgtcagactcaggaaggagcaacatgagggcccaactggagacccggaggcccgagctgggaggaggcagtgggggcggggtg

SEQ ID NO: 556564 - DNA, 201 bp, Homo sapiens; identical to SEQ ID NO: 273710

SEQ ID NO: 556565 - DNA, 201 bp, Homo sapiens
ggccagggagtgtcaggcccagggtgcgcagctgcccggggcgggacgggggaggggcgggaactcatgactcggggagccagactgcgatcagacgcgcstgcccagctgaaccaggtgcgtgagaaggctgccttcaggtggccgggggctccctccaggtaggtgtgggcaccttgggcagccagaaccccagggagg

SEQ ID NO: 556566 - DNA, 201 bp, Homo sapiens
tctttgccttcagcaccccctgtgcccctgacctgtgcagggctgtggccggggccatcgcccgccagcgggagcggctgccagagctgaccaggccccarccctgccccctgccacgggccacctctctgccctccctggacacccccggagagcttcgggagatgccaccaggacctgagccacccacgtccaggaaaa

SEQ ID NO: 556567 - DNA, 201 bp, Homo sapiens; identical to SEQ ID NO: 273712

SEQ ID NO: 556568 - DNA, 201 bp, Homo sapiens
ctctcctctcaggagccggcatcatggattccttcaaagtagtgctggaggggccagcaccttggggcttccggctgcaagggggcaaggacttcaatgtrcccctctccatttcccgggtgagcctaggtttggggagggggctcccccagcggtctttcggtgcttaggtctccagagggtgatggggggagtcctaac

SEQ ID NO: 556569 - DNA, 201 bp, Homo sapiens
ctgcccagagtgggtgaggccagcctgtcggctggcatctctgactggcctgggggtcaggagggggtggggacttcctgcccctatatccgcctgccccragagacccacccaggcgccgggtgggcaggcagctgttgtcaggaagcccaaggcaagcccagcctggaggggcccagagggtcgtggcctgaggagggg

SEQ ID NO: 556570 - DNA, 201 bp, Homo sapiens
ggtggagctggaggctggctcctccctgtagcagggggattgccttataagcccaagaatgcagccccacgctgggatggccaacagtggctgcggtctgyagagctgaaaagggctggcctaggcctggccccctgaaccccactggtgggcctctcagctggtcaccaggctgcagctccagctgtatggtccagttgt

SEQ ID NO: 556571 - DNA, 201 bp, Homo sapiens
acagaagagaaaggataacttcatcgtttctgctgaaccagttggataaatgttggtggcacttcttgaagtgaggaaggagttaggaaggtgggaaaggyacaagtttgaattgggccatgatggtctgagatacctagtacagtggttccccaacctttttggcagaagggaccgctttcatggaagacaatttttcca

SEQ ID NO: 556572 - DNA, 201 bp, Homo sapiens
gggggttgggggaatggagactctggtgttcttccaggatgtgtgtggacacagaatgcaaagcctggagggatgctagagccatagggaggaagatttcrgctcacttattcatgcaagcacttcctgatgggtaaggtcttagagcaagctgaggccaagaggcgggcagtcgaggtgctgctgcaggcacccccactc

SEQ ID NO: 556573 - DNA, 201 bp, Homo sapiens
ttgttgattactttcatttccactttctcacccccattctcccctcaattaactctccttcatccccatgatgccattatgtggcttttattagagtcacsaaccttattctccaaaacaaaagcaacaaggactttgacttctcagcagcactcagctctggttcttgaaacacccccgttacttgctattcctcctacc

SEQ ID NO: 556574 - DNA, 201 bp, Homo sapiens
cagctgcacacacccttggcacatcctgaacctcattttcatgacggacacacaatttttgctctctcctgtccaagcctcatcctctggccgccacctcyttccagctcacttcctttagtgcggccagtaccgcccctgcctaggcatgtcgacctgcagggacccttttctggctcttcgaggcctctgcccaccatc

SEQ ID NO: 556575 - DNA, 201 bp, Homo sapiens
ggaagggagtcagggtggaggatcccacccaggtatggggagtggaatggagtgcgggtgtcagcctgagacggcaggggctgagcaggctctgccagacmctgcctccgggagagatgggaaatacaggagtgggagagggtcgaaggctcaaacctcccagcagggaagagcttcacagcctctgacccatgaaatagt

SEQ ID NO: 556576 - DNA, 201 bp, Homo sapiens
acacgcccctgcccacgttcattgcggccaacacaagcaccctgtgccggttccaggggcacaggtgacctgggccttacctgccacccgtgggctcaaayccactgcagcagacagacgggatggaaatcattaggactccatgttgctctgcacggccgagtgacacgaagaggcaggcggagggagctgtgaggctta

SEQ ID NO: 556577 - DNA, 201 bp, Homo sapiens; identical to SEQ ID NO: 273724

SEQ ID NO: 556578 - DNA, 201 bp, Homo sapiens
gatgccttttccacatccagatgtctctggtgctgtgggattcttaaataaacaaacatttcatacagaatgtgagatgatggagatgctatggggaaaartaaagcagagggagggcctagtgtgtgatgcgggtgaggcatccagggattgctgtttcagctgtgatcaggaaaggccctgggaggaggccacatctga

SEQ ID NO: 556579 - DNA, 201 bp, Homo sapiens
tcctcttcggccacctctgtttctctgttcctcttcacagcaaaaactgttcaaaagagttgttgattactttcatttccactttctcacccccattctcycctcaattaactctccttcatccccatgatgccattatgtggcttttattagagtcaccaaccttattctccaaaacaaaagcaacaaggactttgactt

SEQ ID NO: 556580 - DNA, 201 bp, Homo sapiens
ggaccccagagcctgccgctactgctaggcccggagcccaacgatctggcgtccgggctctacgcttcagtgtgcaagcgtgccagtgggcccccaggcartgagcacctctatgagaacctgtgtgtgctggaggccagccccacgctgcacggtggggaacctgagccgcacgagggccccggcagccgcagccccaca

SEQ ID NO: 556581 - DNA, 201 bp, Homo sapiens
ccaatgtctcctcacaggcatattggggaaacaggtcaggctctcccaccgtatctgcaagtgtactggcatccatctgtcttcttcctacccctacagtrgaaacagtgtctgtccccagctgtgctctgatcccggctcctttcacctcagagcttggaaaattgagctgtccccactctctcctgcgcccattcatcc

SEQ ID NO: 556582 - DNA, 201 bp, Homo sapiens
aagggcacccaggccctctacagctggccctaccacttcctgcgcaagttcggctccgacaaggtgaggtgcaggggtgggaaagggtgaggggctgacascctggaccctcctgctaatccccacccgtgtgccctgtgcccagggcgtgttctcctttgaggccggccgtcgctgccactcgggtgagggcctctttgc

SEQ ID NO: 556583 - DNA, 201 bp, Homo sapiens
cctgggacctgccacccacactcacgtggttggggccattcagggctgtgggtcccatgtggactggatgcccagcgtgagtgtataccgtgagggccttwgagctctcggacagcgtggagtggtcaaggaaggcctccaggaggaagaggtggccaaccgccccaggcagcacagtggtgagggggccctggaggggct

SEQ ID NO: 556584 - DNA, 201 bp, Homo sapiens
tccttcatccccatgatgccattatgtggcttttattagagtcaccaaccttattctccaaaacaaaagcaacaaggactttgacttctcagcagcactcrgctctggttcttgaaacacccccgttacttgctattcctcctacctcataacaatctccttcccagcctctactgctgccttctctgagttcttcccagg

SEQ ID NO: 556585 - DNA, 201 bp, Homo sapiens
caggaacaaggcaggccgcctgtggaggacctcagccctgccctgccctcctcatgaatagtgtgcagactcacagataataaagctcagagcagctcccrgcaggggcactcacggcacacgcccctgcccacgttcattgcggccaacacaagcaccctgtgccggttccaggggcacaggtgacctgggccttacctg

SEQ ID NO: 556586 - DNA, 201 bp, Homo sapiens; identical to SEQ ID NO: 273716

SEQ ID NO: 556587 - DNA, 201 bp, Homo sapiens
caggggaactggcaagtggagaggccctgaggcagaaatatgcttggcctgctggaggaaatgtgagtgaggaggtcagggtggctggagtggagggagcragtggtaggagtcagacccagtttattcatattctgtaggtcttaaggacttcagttttgagtgcaatatgagcccactggaatgctaaaagctgagagt

SEQ ID NO: 556588 - DNA, 201 bp, Homo sapiens
gaagggaccgctttcatggaagacaatttttccacagactgggggtggggtggggatggtttcagggtggttcgagtgcagtacatttatcattagactctttttttttttttttttttgagatagagtctcgctctgtcacccacactggagtgcagtggagccatcttggctcactacaacctctgctgcccaggttca

SEQ ID NO: 556589 - DNA, 201 bp, Homo sapiens
aagggaccgctttcatggaagacaatttttccacagactgggggtggggtggggatggtttcagggtggttcgagtgcagtacatttatcattagactctttttttttttttttttttgagatagagtctcgctctgtcacccacactggagtgcagtggagccatcttggctcactacaacctctgctgcccaggttcaa

SEQ ID NO: 556590 - DNA, 201 bp, Homo sapiens
agatcacaccactgcactccagcctggatgacagagcgagactccgtctcaaaaaaaaaaaagaaaagaaaaaagaaaaaaaaagaaaagtgtttcaagcwggggaactggcaagtggagaggccctgaggcagaaatatgcttggcctgctggaggaaatgtgagtgaggaggtcagggtggctggagtggagggagcaa

SEQ ID NO: 556591 - DNA, 201 bp, Homo sapiens
ctggcggccgatcccaacgaggctccctggagcccgacgcagagcagcgccctggccgggccaagcaggtatcgacgaccgcgcggggcgtcttgggctgsaccaggcgggcgcccggggcctgctgaggaccacaaagggcactgggggtcgtggtccaggctgtgcttcctcccgctggccctggcccctgcctccgcc

SEQ ID NO: 556592 - DNA, 201 bp, Homo sapiens
ccgcaagatggaatactactcagccataaaaacaaacaaacgcctggcacagtagctcttgcctgtaatcttagcactttgggaggctgaggtaggaggawtgcttgagcctaggaattcaagatcagcctgggcaacatagtgagaccctgtctcaaaaaaaaaaaagaaaagaagaaagaaagaaatgtacagacaagg

SEQ ID NO: 556593 - DNA, 201 bp, Homo sapiens
gacagcccaggcagacctgggagacttgggaagggagtcagggtggaggatcccacccaggtatggggagtggaatggagtgcgggtgtcagcctgagackgcaggggctgagcaggctctgccagaccctgcctccgggagagatgggaaatacaggagtgggagagggtcgaaggctcaaacctcccagcagggaagag

SEQ ID NO: 556594 - DNA, 201 bp, Homo sapiens
tggcaggtgggtatgacaggcaccataccccaacctgctcaaaaccctaagttagcaaaggaagacagaagactggcttgcctgcccattcccctcccccyacccccaacagcagcctcacatccctgatcagtaacactgtgattctgaggtgccaagaggaggggctttaccagcccctgggtgattactaccaaacgg

SEQ ID NO: 556595 - DNA, 201 bp, Homo sapiens
ctttgctctttggaagaactggcattccctgaggcaccctgcagtgtgtgcccactgatgactgagtcacttgcactggacaagaagtcattttttttttwattgggaaactcatgtaacaaacctacatttattgaaaatgaaatcagtaactaagactctgcaggccccaccccaaccagcaccaaggcctctacttgg

SEQ ID NO: 556596 - DNA, 201 bp, Homo sapiens
gccagacggaggttgcccaggccggtcctgaactcccggcctcaagtgatccacccgcctcggcatcccaaagtgctgggattacaggcaagagccaccayaccccgccatgagttttttaacgaaaagtgacagaaggtgagagctgaagggttttgccgttcgttttaatatccttacttgggaagattaaaagctgct

SEQ ID NO: 556597 - DNA, 201 bp, Homo sapiens
ctgggccctcttcagtgtcttagccccatgaggctctgggcacacaagcaagtattaagcctgggctggtgctctgagtgaggcatgtacaaagagctcastcactgtgtcctggacatccagtggaaacccagtgttcttaggagacacaaaatctgacataatcctctcacacccacagcaccaccagtcccccagtcc

SEQ ID NO: 556598 - DNA, 201 bp, Homo sapiens
gcacttcttctccgtctctccgatgtgaaagtagagcgcgcttccgcgcgtcgccagccacagcaccagcaggagggtccgcatcactctacccagcccgsttccgggccggggccggacgagcagcacgcccagctccacagccatcttgctccacctgcctgcgcagccgcagccggccgcgccacgtcgccctgccgc

SEQ ID NO: 556599 - DNA, 201 bp, Homo sapiens
tccccgactttccttcatctgttcatttagccaacagactgggccctcttcagtgtcttagccccatgaggctctgggcacacaagcaagtattaagcctrggctggtgctctgagtgaggcatgtacaaagagctcagtcactgtgtcctggacatccagtggaaacccagtgttcttaggagacacaaaatctgacata

SEQ ID NO: 556600 - DNA, 201 bp, Homo sapiens
gatgactgagtcacttgcactggacaagaagtcattttttttttaattgggaaactcatgtaacaaacctacatttattgaaaatgaaatcagtaactaaractctgcaggccccaccccaaccagcaccaaggcctctacttggtctggtcccagttctttaagccccagaatggacaaccatgtgaagcagctcaggtc

SEQ ID NO: 556601 - DNA, 201 bp, Homo sapiens
tctggtcccagttctttaagccccagaatggacaaccatgtgaagcagctcaggtcaactgcagggccacattcccacactgcaaacccctccacccaccytcaactcacacacaccctggatcagcaggtctaggctgaaagagagaacagtgaggttcccagggtggcaggtgggtatgacaggcaccataccccaacc

SEQ ID NO: 556602 - DNA, 201 bp, Homo sapiens
ggtatgacaggcaccataccccaacctgctcaaaaccctaagttagcaaaggaagacagaagactggcttgcctgcccattcccctccccccacccccaasagcagcctcacatccctgatcagtaacactgtgattctgaggtgccaagaggaggggctttaccagcccctgggtgattactaccaaacggcccagaggc

SEQ ID NO: 556603 - DNA, 201 bp, Homo sapiens
gcctgcccattcccctccccccacccccaacagcagcctcacatccctgatcagtaacactgtgattctgaggtgccaagaggaggggctttaccagcccytgggtgattactaccaaacggcccagaggccagagagagagggcaggaatttgccccactacctgctcagtattagccaagctgctgccttcagcttgtg

SEQ ID NO: 556604 - DNA, 201 bp, Homo sapiens
tccagcctgggtgacacagcgagagaatctgtctcaaaaaaaaaaatcagccaagcatggtggcgtgcgcctataatcccagctactggggctggctgagrcaggagaatcccttgaacccgggagacagaggttgcagtgagccgagatagtgccattgctctccagcctgggtgacagtgagactctgtctcaaaaata

SEQ ID NO: 556605 - DNA, 201 bp, Homo sapiens
gctgagacaggagaatcccttgaacccgggagacagaggttgcagtgagccgagatagtgccattgctctccagcctgggtgacagtgagactctgtctcmaaaataagaaaaagaaaaaaaaaaaaaaaaagaaaacttaatctatgcttcctctaccatggcgtgtattttctcatctatctttcttgtctcttattcc

SEQ ID NO: 556606 - DNA, 201 bp, Homo sapiens
ggatgccaagtgaatcatctccctgttcagccccaaagagcctttctacccctcttacctccttatccagaactggaatttgtcctgaatgtttcctcagycagtgaagagaccagggagtaggaggtatcgttctctaggccctcaacagcacccccaactcccaactcccaactcagcctctccatcgctgacagaccc

SEQ ID NO: 556607 - DNA, 201 bp, Homo sapiens
ggactataggcgtgtgccaccatgcctggctaatttttgtatttttagtagagacgaggtttctccatgttggtcaggctggtcttaaactcctgacctcrggtgatccgcctgccttaaaaaaaaagtggtgggattacaggcatgagccaccacgcccggcaggagatccagcttcttaagcctcaaactcaaattcga

SEQ ID NO: 556608 - DNA, 201 bp, Homo sapiens
tagagttcaaaaccttctgtgagaatcttctctggcctggttggagatccaccttcttcttttttttttttgagacggagttttgctcttgtggctcaggrtggagtgcaatgacgtgatctcagctcactgcaacctctgcctcctgggttcaagtgattctcctgcctcagcctcctgagtagctgggactataggcgt

SEQ ID NO: 556609 - DNA, 201 bp, Homo sapiens
cacggactcagacccaaaataaggatacagtcagcgtccacacaccacacagctccggtatggcccatgtaggtgcccagcctctcaccattcacagagtrccatacattgacgatctggaaaagtcaaaccacaggatagtacacatcccagtaagagcaatggcttcctattttgccccaggaaccctcagcagcctgt

SEQ ID NO: 556610 - DNA, 201 bp, Homo sapiens
ttatttcttagagttcaaaaccttctgtgagaatcttctctggcctggttggagatccaccttcttcttttttttttttgagacggagttttgctcttgtkgctcaggatggagtgcaatgacgtgatctcagctcactgcaacctctgcctcctgggttcaagtgattctcctgcctcagcctcctgagtagctgggact

SEQ ID NO: 556611 - DNA, 201 bp, Homo sapiens; identical to SEQ ID NO: 405897

SEQ ID NO: 556612 - DNA, 201 bp, Homo sapiens
accacaggatagtacacatcccagtaagagcaatggcttcctattttgccccaggaaccctcagcagcctgtagcaaggctgattctgccctcttctgttyatttcttgggaaacagcagggagctggtaaaaagaccaactcctggattctcctcccttcctgaagggaagcaacagaggagtcaggcggcttgtaaagg

SEQ ID NO: 556613 - DNA, 201 bp, Homo sapiens
gccgctgctgtagctggaaaaagatagccaggcaccagtcaggtgcttactctgggaaaggcagagacccaacccaggcttaggtcagctgcttcactggkaccctacctcttgccatcaggatggaaggcaacactgttgataggtccaaagtgacccttgactcttccaaactcttcttcaaaggccaaatggaagaac

SEQ ID NO: 556614 - DNA, 201 bp, Homo sapiens; identical to SEQ ID NO: 405889

SEQ ID NO: 556615 - DNA, 201 bp, Homo sapiens
gcttcttaagcctcaaactcaaattcgaagtactgtgggtcgaagtaatggatacggacgtaaccatcttcgccgccgctgctgtagctggaaaaagatarccaggcaccagtcaggtgcttactctgggaaaggcagagacccaacccaggcttaggtcagctgcttcactggtaccctacctcttgccatcaggatgga

SEQ ID NO: 556616 - DNA, 201 bp, Homo sapiens
ctataaataagggatatagagcaattattctaattggtattttagtagaagtcccccaaccagtaacgtgaatatacctgataatcccttttactgagtcygctcccttgggtactttggtgtgctttttgtatcatggacagttttattaggatggagccttacttacagcttggcaatccacactgctttataaacgtt

SEQ ID NO: 556617 - DNA, 201 bp, Homo sapiens
ccagttcatgcaggccgggaaaagtgattcgaggggagatgtagaagccaccgttgtccagattacggatcttgtaatgtttcaccacctctccctggttytggtcgaagtcccggaccgacagtgaaaacgatcctgaatgaatgaatggatggacaaagcgacgaaagaacgcagtgagtctggcccgccaccgcgccc

SEQ ID NO: 556618 - DNA, 201 bp, Homo sapiens
gttctggtcgaagtcccggaccgacagtgaaaacgatcctgaatgaatgaatggatggacaaagcgacgaaagaacgcagtgagtctggcccgccaccgcscccccaccttgggctcacccagcacccccaactccgggtcatcccgcgcccccacctcgggctcatcccgcgtccccctccgactcaccccgtgtctcca

SEQ ID NO: 556619 - DNA, 201 bp, Homo sapiens
ggtttcaccatgttggtctggctggtcttgaactcctgacttcaggtgatctgccctcctcgacctcccaaagtgctgggactacagacgtgagccaccgygcccagctcgactcctgtttcttaaactgagatactcagcctcccatgggtaccggaagtcatgtcatggtgtgcatttttccagagcatgagtgtttcc

SEQ ID NO: 556620 - DNA, 201 bp, Homo sapiens
cacccccaactccgggtcatcccgcgcccccacctcgggctcatcccgcgtccccctccgactcaccccgtgtctccacctcgggctcaccctgcgccccmcctcgggcacaccccggggcacccccgcgcccggtcgagaccgccgcccgctcacccgcggtgctctcgctctcccggatgaggaaggagccgtgagtgt

SEQ ID NO: 556621 - DNA, 201 bp, Homo sapiens
aaaaaaagttagctgggcatggtggctggagaattgcttgaactcaagaggtggaggttgcagtgagcctagatcctgccactgccaccgcactgttcactccaacttgggtgacagagactctgtctaaaaagaaaaaacaaaagagagacagagagagagaattcatgctgggtctaagtggaagcagggagcagtgga

SEQ ID NO: 556622 - DNA, 201 bp, Homo sapiens
ggggtcagaaagcagaagattgggtcagaccctggcccccttcccccctgctctgctctcagcctctccagcctggttagatgttatccctgagtttaccractactttctgtgtgatcttaggagattcccttcccctctctgggcctcttttcctttctgtatttcaggggagagggccactctattctttcaagggcc

SEQ ID NO: 556623 - DNA, 201 bp, Homo sapiens
gtagccgactcgggtagcacccaccattctccatgtattcagtgatgatgtagatgggctcctgggtgaccacagcgtagagccgaaccagccgctggtgytgcagctgcttcatgaggttggcctcggccaggaaggcgtccggggacatgctgccctgcttcaggctcttcaccgccaccttcgtgtgcccgttgtagt

SEQ ID NO: 556624 - DNA, 201 bp, Homo sapiens
cttaatgggaaacttggcccctaaggaggaggcagagtgaggtcacctgggtctgcttggccagaccctgcagggcccagaccacccttaaatctcacacrtaccctccctggctgtgtactcgttgtcctcaatgaggcgtgctaggccaaagtctgcaatcttgcagctcagggtgtcagacaccagaatgttggcagc

SEQ ID NO: 556625 - DNA, 201 bp, Homo sapiens
gatgtggcatctgcctggggacgttggactcatacccctgagaagatagaggagatgcagctacaaagtttcagattctgagactggaaagaattgaatgrgaagacatggacttgcccttcccatcaccctttcagttcctgcccttggctctaacctgggtaagggatgcggccgtgggtgacaatttccgtcagcagg

SEQ ID NO: 556626 - DNA, 201 bp, Homo sapiens
aaagaaaagagctggggttattaaagagagatacggagatggaagccagccctgggagatgtggcatctgcctggggacgttggactcatacccctgagargatagaggagatgcagctacaaagtttcagattctgagactggaaagaattgaatgggaagacatggacttgcccttcccatcaccctttcagttcctgc

SEQ ID NO: 556627 - DNA, 201 bp, Homo sapiens
gagttataggatgtagtctgtgttttatgtgtagcccctgccctgcctctgaacacatctgtacacgtagattttcccatgatatgtatggtgttttggcttgtgtgtgtgtgtgtgtgtgtgtgtctgtgtgtggctgcgtgagagaccctcttctaaagtagatcccatggccccgctcagagtccagcctgcctgagt

SEQ ID NO: 556628 - DNA, 201 bp, Homo sapiens
agttataggatgtagtctgtgttttatgtgtagcccctgccctgcctctgaacacatctgtacacgtagattttcccatgatatgtatggtgttttggcttgtgtgtgtgtgtgtgtgtgtgtgtctgtgtgtggctgcgtgagagaccctcttctaaagtagatcccatggccccgctcagagtccagcctgcctgagtt

SEQ ID NO: 556629 - DNA, 201 bp, Homo sapiens
ccaccgcaacctctgcctcccaggttcaagcgattctcctacctcagtctcccaagtagctgggattacaggcatgtgccaccacgcccggctaattttgkatatttatttatttacttatttatttatttacttttatgggtatctggtaagtatatatgtttatggggtacatgatatattttgatagaggcatacaat

SEQ ID NO: 556630 - DNA, 201 bp, Homo sapiens
ctccctgggaacctcccactcgtcctcccaccacggcttctggggcttctgggtctggcaggggcggctcaaccgtgtgcacagcccatctgaagcatctscgaggacgagggaggggtgaaggctgtcaatagggcaggcctcgtattgacaccacctcccccacttctccaagcccccatctaggtgaagtggactagc

SEQ ID NO: 556631 - DNA, 201 bp, Homo sapiens
gttataggatgtagtctgtgttttatgtgtagcccctgccctgcctctgaacacatctgtacacgtagattttcccatgatatgtatggtgttttggcttgtgtgtgtgtgtgtgtgtgtgtgtctgtgtgtggctgcgtgagagaccctcttctaaagtagatcccatggccccgctcagagtccagcctgcctgagttc

SEQ ID NO: 556632 - DNA, 201 bp, Homo sapiens
ctcaaaaaaaaaaaagatacacatgacataatctatttgccatttcccattagccaatgaacagcttgtttctcttcctgaaaaaaggatagatcttacaytcccaaagaatcagagccagataacagcaacaaacttattgatcagttactatatggtagccatagttttgtgggttttttgttttgagacaaggtctcg

SEQ ID NO: 556633 - DNA, 201 bp, Homo sapiens
tcaagacaatcccccctctacctggaatgcacgtttctgggtatatatttacctgcctgttgaatgcaagtctgtgcatatgaaaacatatgcagtgagcmctgtgcttatgggtgcatatctgtgggtttgcaggagtctgtgtgtgcagagggatatataacagaatgagactatgaatagcagcgaccgtccctatgt

SEQ ID NO: 556634 - DNA, 201 bp, Homo sapiens
acagtgaaaacgatcctgaatgaatgaatggatggacaaagcgacgaaagaacgcagtgagtctggcccgccaccgcgcccccaccttgggctcacccagsacccccaactccgggtcatcccgcgcccccacctcgggctcatcccgcgtccccctccgactcaccccgtgtctccacctcgggctcaccctgcgccccc

SEQ ID NO: 556635 - DNA, 201 bp, Homo sapiens
ccagcactttgggaggccaaggtgggtggatcacctggggtcagaagttcaagacaaccagcctggccaacaatggtgaaaccctgtctctactaaaaatmcaaaaaaaaaaaaaaaaaaaaagttagctgggcatggtggctggagaattgcttgaactcaagaggtggaggttgcagtgagcctagatcctgccactgc

SEQ ID NO: 556636 - DNA, 201 bp, Homo sapiens
taggattataggcatgcaccaccgaacccagtcggcatgctctcttttgtccaactgctgaattctaactcaaccttcaaggctcagctgaaatattacctttttttttttcctgcaacctctacctcccaggttcaagcaattctcctgcctcggcctcctgagtagttgggattacaggcatgcaccatcacgcttggc

SEQ ID NO: 556637 - DNA, 201 bp, Homo sapiens
tataggatgtagtctgtgttttatgtgtagcccctgccctgcctctgaacacatctgtacacgtagattttcccatgatatgtatggtgttttggcttgtgtgtgtgtgtgtgtgtgtgtgtctgtgtgtggctgcgtgagagaccctcttctaaagtagatcccatggccccgctcagagtccagcctgcctgagttctc

SEQ ID NO: 556638 - DNA, 201 bp, Homo sapiens
gacctcaagtgatccacccacctcagcctcccaaagtgctgggattacaggcgtgaaccaccatgcccagcctagactcctgtttcttttctctctttccttttttttttttttttagacttgctctgttgcccaggctggagtgcagtggtgtgatctgggctcactgcaagctctgtctctcctccctcagcctcccta

SEQ ID NO: 556639 - DNA, 201 bp, Homo sapiens
gggcagaagcaagagttgctggcccaagttgccccagggggaggcccccagacctttctcctccaactgggagtctagaagtgtgtctgacatgtgaaaargaagattgaagagtgagaatggaggagtgtgtgttcagggtaaggatgcccaggatatgtaaaggtttttttgcagaggggctagggtagagcatgctgg

SEQ ID NO: 556640 - DNA, 201 bp, Homo sapiens
ggggtgaatgctcttccagaacattcttgccaccttaggcttgcccccagacaggatcagatcagaggatacacctttttctcatgcctggaggtgagtctttttttttttttttttttttttgatagagtcttgctctgtcacccaggctggagttcagtggcatgatctcagctcactgcaactgtagcctccacctcc

SEQ ID NO: 556641 - DNA, 201 bp, Homo sapiens
gttcctttcaaaaattccatccctgtcttggctgaattcaggggtaaagggctttgtccaggagatggtgggaggagtcagtgtatactgacaacctactrtgagtcaggctctttcacaaatggtctctcattttttcttttttctttttctttttctttttttttttttttgagacaaattctctctctgttgctcagg

SEQ ID NO: 556642 - DNA, 201 bp, Homo sapiens
attgaatgggaagacatggacttgcccttcccatcaccctttcagttcctgcccttggctctaacctgggtaagggatgcggccgtgggtgacaatttccrtcagcaggatcccaaaagaccacacatctgacttgatggtgaatgtcccgtagttaatggcttctggcgctgtccacttaatgggaaacttggcccctaa

SEQ ID NO: 556643 - DNA, 201 bp, Homo sapiens
aaaagtcagcctatgttaaattaagatcagaggaactctagctttgcagggtatctggcctctactgtttcctctatggccccccagctacaggtggcagwtcctgccctctataagcatgtgagctttggaggatagggcctggcagcaatcgtaagtccataggatctggcaatgccagaaatgtttgtagtcagaggc

SEQ ID NO: 556644 - DNA, 201 bp, Homo sapiens
caggcgtgagccaccgtgcccggccaggaggatctcttgagcccaggaattagagaccagtgcctgggtaacacagtgagaccttatctctacaaaaaaaatctgaaaattagcagggcatggtggtgcgcccctgtagtcctagctactcaggaggctgagtggggaggatcacttgagcctgggaggttgaggcggcag

SEQ ID NO: 556645 - DNA, 201 bp, Homo sapiens
gggtgaatgctcttccagaacattcttgccaccttaggcttgcccccagacaggatcagatcagaggatacacctttttctcatgcctggaggtgagtctttttttttttttttttttttttgatagagtcttgctctgtcacccaggctggagttcagtggcatgatctcagctcactgcaactgtagcctccacctccc

SEQ ID NO: 556646 - DNA, 201 bp, Homo sapiens
tcccaggcttctcccctctctctgtggtctcaggaaatgggagagccagaaaggggtaccttgtacagtgtccaagacatacatgcacaggctacacatgyacaagacatgtgcagagtccacgcaactacaggacacgtgtacagacacaaggtgcatatgtgtcacatgtgggtgggattcatgtgcagagtccatatg

SEQ ID NO: 556647 - DNA, 201 bp, Homo sapiens
ggtgaatgctcttccagaacattcttgccaccttaggcttgcccccagacaggatcagatcagaggatacacctttttctcatgcctggaggtgagtctttttttttttttttttttttttgatagagtcttgctctgtcacccaggctggagttcagtggcatgatctcagctcactgcaactgtagcctccacctcccg

SEQ ID NO: 556648 - DNA, 201 bp, Homo sapiens
ccacacatatcagttcacgcccatcaggagattcttccctcgatcgctgaggctaaaatcactcctcgcatgtccatctggatgccttgggtgatctctgkctctctctctctctctctctctctctctctctctctctctttctcaggagattcttgtcactggggtctgccccagaaaccagaaggattcctgggtcct

SEQ ID NO: 556649 - DNA, 201 bp, Homo sapiens
ggtgaagtggactagcaagggggtgtggggctgtcacccaaacacttggggccgtagggtcaggttccacacctcacccactgcggggaatggagtagggmattgaaagatggatgggggacacctgagggggactgaggggagataggctgatagggcacgggggaggggtcccgtcgggctcactggtgtaatggcgga

SEQ ID NO: 556650 - DNA, 201 bp, Homo sapiens
ctcagggtgacctaattaccattttcttaacccccactgcccacccacaaagagtggacagcaaagagatgtacaacagtcatcaacagacatttattgarctcctgatgtgtgccaggccaggcaccaaggaggagcacacagaggtattagataaagtcctggcccttgaggaacttctggatgatctgaggaaagaaa

SEQ ID NO: 556651 - DNA, 201 bp, Homo sapiens
accccaccagactcaccagctcccgtcggagccactcaagggcggagtccattgagtcgaaaccacagatgtccccaggtccccctggtccaggtttggcytgggccctgcgccaggcctggctctggacctgggctgtccactccagatatgagggccgccgagtctgcagctgcagcttggctgtcagtgccttcacag

SEQ ID NO: 556652 - DNA, 201 bp, Homo sapiens
ctctggggcacccctccctttcctcttcccaggcaggcaggggaagcggcattgggagagggggcggggagtcggggggcacaggtgttcctcagcagagrgtgaagcgccgggcgctgatgttcatgcgcgtgaggcccaggtgccgcagcagcggggccagggctaggccggccccgggctccagctccagctccagct

SEQ ID NO: 556653 - DNA, 201 bp, Homo sapiens; identical to SEQ ID NO: 405881

SEQ ID NO: 556654 - DNA, 201 bp, Homo sapiens; identical to SEQ ID NO: 406176

SEQ ID NO: 556655 - DNA, 201 bp, Homo sapiens
tgaccttggaagggccagttaggagtcccttctcataaggcacgaggcagggcccttggggacggtgggctcccaccctgggggcttgcccgtgcactcakgcatgccacgcctcgttctgcctttctcagggtgtgtctgcctgtcctactgccacctgccatttcttgttacagtttgttccaccttctgttgtaagaa

SEQ ID NO: 556656 - DNA, 201 bp, Homo sapiens
gacttggtctggtctctctggtggctacaaccccagagttttaaggacttggaaaggaaagcacaatcagagaagaaaacagcccccgaaccagcaggagyggcctggcacatggaccggcctgagcgatgtgcactccacccaagccaggctcccagggggcctgatttctctctcactgtctctttttttaaaatggtt

SEQ ID NO: 556657 - DNA, 201 bp, Homo sapiens
aaactgcaccgccggccagataccctcctgaccccgaggacttggtctggtctctctggtggctacaaccccagagttttaaggacttggaaaggaaagcmcaatcagagaagaaaacagcccccgaaccagcaggagtggcctggcacatggaccggcctgagcgatgtgcactccacccaagccaggctcccagggggc

SEQ ID NO: 556658 - DNA, 201 bp, Homo sapiens
gtgaggccagctctcaggacatgactgcacaggtgaccagcccatcgggcaaggtggaagccgcagagatcgtcgagggcgaggacagcgcctacagcgtscgctttgtgccccaggaaatggggccccatacggtcgctgtcaagtaccgtggccagcacgtgcccggcagcccctttcagttcactgtggggccgctgg

SEQ ID NO: 556659 - DNA, 201 bp, Homo sapiens
gacgaggtccttggacggtgcaccccacggccccaggaggggagtttcatgtggggccaggtgggccccacacaggatgttccctgagatttctccagatracttgatgtctgtcagccccactctcccttggggccatctctaggcctcctgatatagcagctgaggtcagcccagggccctttgccccgtccagtcccc

SEQ ID NO: 556660 - DNA, 201 bp, Homo sapiens
cagaaccagtgcctgtcactgattcctgggggcatctccccgcccccaacaaaacaagtggcttcccagcttcacagcccctccgcgggctgggagagggytgaagacaggtccccaaccactgcccgcgtctgcgggctctggggccgaggggagctggcgcgggaggccctcttcgtgcatgtgctcagcagctgggtt

SEQ ID NO: 556661 - DNA, 201 bp, Homo sapiens
gtgaccatcacgtggggcggctacgccatccctcgcaggtgagtaccttgcgccccccatgctgtcctgtctaggccatcacagggagggacgaggggcastgggctgcgagggagtttgaggggagatggagtttgggctgcgagggactttggggggcacttcctggcatggacaccagctccctctctgcccagcccc

SEQ ID NO: 556662 - DNA, 201 bp, Homo sapiens
tcctagcaaagcggagattgcatttgaggatcgcaaagatggctcctgcggcgtctcctatgtcgtccaggaaccaggtgggcgtccacactggcagtggrgctgggcctgcctgaccttccagactgggtttctgcccactggccaggcaggagatgcttggggccacagaactcccctccccggagccccctgctcttc

SEQ ID NO: 556663 - DNA, 201 bp, Homo sapiens
ggacactcgcaatgcaggtacctcctgccccagagagcccccattccagcgggtgcctcccacaggcacttgtcctcgtcctgcccagcacccccttggcygcactctctcctccctgaaacttcctgaccagtctgcgtcaggattcgcattctggggccccttgcgggaaagtgaatggccccgcatcagttctctccc

SEQ ID NO: 556664 - DNA, 201 bp, Homo sapiens
gggttgctcactgtccagatcttggtgagtctctgtgcatcccaccccgcaggtcatgctccaggcacaggcgggccttgacctctgcttctccctcaggrccccgagggtaagcccaagaaggccaacatccgggacaatggggatggcacgtacactgtgtcctacctgccggacatgagtggccggtacaccatcacc

SEQ ID NO: 556665 - DNA, 201 bp, Homo sapiens
gtggtgcctgtggagccaatggagtccatgctgaggcccttcaacctggtcatccccttcgcggtgcagaaaggggagctcacaggtactgccctgtggcycccaggcatgagggctgaggggagaaaccctcttccaggcccagtcctgtgtcttaatgatgaaaacaaaggcccagagagaggaagtgagctctaccca

SEQ ID NO: 556666 - DNA, 201 bp, Homo sapiens
cgaccagctggggcgccccaccatgaggaggttcaaaggggctgcccacgaggcaggggcatcctgcttctgctagctcccctactccatttagtggtggraaggggctatccatggggccaccttctgagtattgtctcagcaccgaaatcgagcatctgggcacctcagggggtgtcagaaagactccccacttctctt

SEQ ID NO: 556667 - DNA, 201 bp, Homo sapiens
ctcccagctcatgatgccagcaaggtgcgggccagcggcccaggcctcaacgcctctggcatccctgccagcctgcctgtggagttcaccatcgacgcacrggacgcgggcgaggggttgctcactgtccagatcttggtgagtctctgtgcatcccaccccgcaggtcatgctccaggcacaggcgggccttgacctctg

SEQ ID NO: 556668 - DNA, 201 bp, Homo sapiens
ccagggcctcctcctggaccctcccacagcaccttcctggggaatggagacgtaccctggctctgtcgagggagtcccagagtgcccccacccccagacayggaatgtcatcggcttctgggaactggtccctcctccctgccccacagtcctccctcctgcccatgtctatggggaggactctggctcaagatgagatca

SEQ ID NO: 556669 - DNA, 201 bp, Homo sapiens
ttattcttgtgtgtgttttcttagcaagttcctagccattttcccatgttggtctggcttccctgtgggcatttcaaaggcagggaaggcctcctcctccraggctcctcagcatcagggggacccatcagggctggtgggcagggtctaatgtccttctcctcacagggagcccgttccgcgtgccagtgaaggatgtgg

SEQ ID NO: 556670 - DNA, 201 bp, Homo sapiens
ggaaggtgaagtgctcagggccagggctgggggctggtgtcagggcccgggttcctcagaccttcacagtggactgcagtcaagctggccgggcgcccctrcaggtggctgtgctgggccccacaggtatagaatggccggggcagggaggagggaggtggggcgggacgcccggaggctctgctgaccctgtgccccttg

SEQ ID NO: 556671 - DNA, 201 bp, Homo sapiens
gcagggccgggatctgatgatattgccctcggggcaggaggggtggtgggggcgcacactccctgattgatgcccctgtggctggcttccaggcgtgcatytggtggaggtcctgtatgatgaggtcgctgtgcccaagagccccttccgagtgggcgtgaccgagggctgtgatcccacccgcgtccgagccttcgggcc

SEQ ID NO: 556672 - DNA, 201 bp, Homo sapiens
accttgccccaggcttctccatcgaggggccctcacaagccaagatcgaatgtgacgacaagggggatggctcctgcgatgtgcggtactggcccacggarcctggggagtacgctgtgcacgtcatctgtgacgatgaggacatccgagactcacccttcattgcccacatcctgcccgccccacctgactgcttcccag

SEQ ID NO: 556673 - DNA, 201 bp, Homo sapiens
ccctctttcaacaaatatttattgagcacccgctgtgtgcagacaccaggcgaggccccagggaggcttataccctggtgggaagcagacctccaccagcygggtccctacggcacagacggagggggttggcagggaggctgctggaaggtgctggggccaaggtgggctcagataatccctgatgctgacccagccccc

SEQ ID NO: 556674 - DNA, 201 bp, Homo sapiens
ctacagggggtctgtcactggccgtggagggcccatccaaggcagagatcacctgtaaggacaacaaggatggcacctgcaccgtgtcctatctgccgacygcgcctggagactacagcatcatcgtgcgcttcgatgacaagcacatcccggggagccccttcacagccaagatcacaggtgaggcgggtgtatgggcat

SEQ ID NO: 556675 - DNA, 201 bp, Homo sapiens
gatgctgtcactgggaacagggagggatgattccgcagacatggtggagccctacctgtgtgaggcagggtgcctcagaggaagcaaagggggcccttttrgaggctgcccctgtccatgctgggtcccctgggtgtgtcctgagccagcatctagctgagagcaggggtgtgttcccctcgagagccctgactgagcctc

SEQ ID NO: 556676 - DNA, 201 bp, Homo sapiens
gtgcttatggcccgggtctcaagggtggactggtaggcacccccgcgccattctccatcgacaccaagggggctggcacaggtggcctggggctgaccgtrgagggcccctgcgaggccaagatcgagtgccaggacaatggtgatggctcatgtgctgtcagctacctgcccacggagcctggcgagtacaccatcaaca

SEQ ID NO: 556677 - DNA, 201 bp, Homo sapiens
cgcaggtcattgcccctgaggagattgtggaccccaacgtggatgagcattctgttatgacctacctgtcccagttccccaaggccaagctcaaacctggygcccctgttcgatccaagcagctgaaccccaagaaagccatcgcctatgggcctggtatgtgtgagcccctggcggccctcctgggcagctgggcacatg

SEQ ID NO: 556678 - DNA, 201 bp, Homo sapiens
ctggagtagcagctgggatccaagcccacctgaagaaggggcactgagcccaggttaaaggagctgtgcccttcatatcctcaccaccttgtcctggcccyccgttgcccctcgttccctccgaacaaagaggcctatgaggcagctctgtctcgcagctgttccccagttgctattccttctcctggagccaacaaccaa

SEQ ID NO: 556679 - DNA, 201 bp, Homo sapiens
ctagtggtccaaggcccctcagcacccccaacctcctttctcttcctcccctagcctgtaaccccaacgcctgccgcgcctctgggcgaggcctgcagccmaagggtgttcgcgtgaaagaggtggctgacttcaaggtgtttaccaagggtgccggcagcggggagctcaaggtcacggtcaaggggccaagtgagtgcc

SEQ ID NO: 556680 - DNA, 201 bp, Homo sapiens
gaccgcctgtcccgtggtgcccccgctcctcccactgagccatttttgttagtggtcactacacacatcggtgcccattctgggtggagcctgcagtctgrggagaggaaagcattgtggcttggccagcctaggactgagggagatgtgttccttgctttcccccaggttatgggggcttggggctgagtattgaaggcc

SEQ ID NO: 556681 - DNA, 201 bp, Homo sapiens
agccagctgaccgccagcatccgtgccccctcgggcaacgaggagccctgcctgctgaagcgcctgcccaaccggcacattggtgagcgtggggcctcacrgggacctcaggggtgggggcccacaggatgctctgcctaacacccactttccacagggatctccttcacccccaaggaggtcggggagcacgtggtgagc

SEQ ID NO: 556682 - DNA, 201 bp, Homo sapiens
caacatcaagtttgctgacaagcacgtgcctggtaaggctctgggcagaggtcggtggcgagagacagggaggccaggaggctggggctctgaggttcctracccaccctttgtccccacttcaggaagccccttcactgtgaaggtgaccggcgagggccgcatgaaggagagcatcacccggcggagacaggcaccttc

SEQ ID NO: 556683 - DNA, 201 bp, Homo sapiens
tccatgccacccagccaactgtttatcccttctgctcctcaagccccttcaagatcaaggtcctcccagctcatgatgccagcaaggtgcgggccagcggsccaggcctcaacgcctctggcatccctgccagcctgcctgtggagttcaccatcgacgcacgggacgcgggcgaggggttgctcactgtccagatcttgg

SEQ ID NO: 556684 - DNA, 201 bp, Homo sapiens
aagatcacaggtgaggcgggtgtatgggcatgtacagcccatgaggcacacacaccgcatacagtgcactcatgtgcaagcccagcccgttcaagtcactygtgacattagggcagaggcccttcaaggtgtgaggggtcatattttgataaatgtaaaaacactctgttctccacggcagctaagaagcagtcagccact

SEQ ID NO: 556685 - DNA, 201 bp, Homo sapiens
tgcagcgaggcggggcaaggtgcgcccagccggaaggggtgggtctgggagggggcgggggtgagtcgagtcgggggctgagcccaactcacagcagtgcycgcttctctgcaggcgacgtgagcatcggcatcaagtgcgccccaggcgtggtgggccctgcagaggctgacattgacttcgacatcatcaagaatgaca

SEQ ID NO: 556686 - DNA, 201 bp, Homo sapiens
ccaaagatgctggagaaggtgagggagctgcaggtcgcaggctggggtggagactcaccaggggcaggggtgagggcaggacctctgatcttggccacacytccacctacagggggtctgtcactggccgtggagggcccatccaaggcagagatcacctgtaaggacaacaaggatggcacctgcaccgtgtcctatctg

SEQ ID NO: 556687 - DNA, 201 bp, Homo sapiens
gggaggccaggaggctggggctctgaggttcctgacccaccctttgtccccacttcaggaagccccttcactgtgaaggtgaccggcgagggccgcatgarggagagcatcacccggcggagacaggcaccttccatcgccaccatcggcagcacctgtgacctcaacctcaagatcccaggtagaagcctggaggaccct

SEQ ID NO: 556688 - DNA, 201 bp, Homo sapiens
ctggtgagttaggggctgggctgggctggggcttgggtgagaggagcaggccgtagcttcagtcctgccttccctctttcaacaaatatttattgagcacycgctgtgtgcagacaccaggcgaggccccagggaggcttataccctggtgggaagcagacctccaccagctgggtccctacggcacagacggagggggtt

SEQ ID NO: 556689 - DNA, 201 bp, Homo sapiens
ttacctggccagggtgcagggggagactggggctgctgggaaaagagggcgccatgtgacatcactcctttccatcgcaggtcattgcccctgaggagatygtggaccccaacgtggatgagcattctgttatgacctacctgtcccagttccccaaggccaagctcaaacctggtgcccctgttcgatccaagcagctga

SEQ ID NO: 556690 - DNA, 201 bp, Homo sapiens
aagttgggcagagccagaactcaggtgcaagccatctgtccccagttcagggctcaggccactgccacaggctgtctcttgatgcctggcttctcgggtgrcagcagaagcactcaggaccaggcctgggacagcagggaggttgcagtgggggaaaccagggtctccacgtaactgtgtctgccctgcaggagaggtgcg

SEQ ID NO: 556691 - DNA, 201 bp, Homo sapiens
ccttcactgtggactgctcagaggcaggcgaggcggagctgaccattgagatcctgtcggatgccggggtcaaggccgaggtgctgatccacaacaacgcrgatggcacctaccacatcacctacagccctgccttccctggcacctacaccattaccatcaagtatggcgggcatcccgtgcccaaattccccacccgtg

SEQ ID NO: 556692 - DNA, 201 bp, Homo sapiens
tcctgaccccgaggacttggtctggtctctctggtggctacaaccccagagttttaaggacttggaaaggaaagcacaatcagagaagaaaacagcccccraaccagcaggagtggcctggcacatggaccggcctgagcgatgtgcactccacccaagccaggctcccagggggcctgatttctctctcactgtctcttt

SEQ ID NO: 556693 - DNA, 201 bp, Homo sapiens
tcattggagaggcttccaatctttttccttcctaataggctaaggtggttcccaacaatgacaaggatcgcacctatgctgtctcctatgtgcccaaggtygctgggttacacaaggtatctccctctaggcccccctgcctgcgctgctcttcacatccttggttccggctgcatggacccctctctcagcctgtacctc

SEQ ID NO: 556694 - DNA, 201 bp, Homo sapiens
gaggtgctggtctacatcgaggaccctgaaggccacaccgaggaggtatgcagaggccgctggggacagagggattcacttgggattggaaccagagagcrtggggccaacaacaggaatggcccggaggtgactgccagagccacacactgtgctgtgcagtctggggaaggtgtcaccatgggggctgagtggggctgg

SEQ ID NO: 556695 - DNA, 201 bp, Homo sapiens
catgattacagccacacagcgaggaaggggtctgggcggtccagtctagtgttttgttatcacaacatcatgtgactcagggttaaaatgcaggaggtttyctttagggatttagcccacaaggactgaggcagccacagtggaattggggtacaggcccctcttagtctctggcagctcacatgtgagtgcagactgcac

SEQ ID NO: 556696 - DNA, 201 bp, Homo sapiens
caagtcagccgattttgtggtggaagccattggcaccgaggtggggacactgggtaagtggctggggggcaggaggagggagtgctgcgggggagggcagyaggggacactgtgggtaatgggtgcagtgcgcatgctggggagcgctggggtgagcagggagataggacatgagggcagctagaggggagctgggggacg

SEQ ID NO: 556697 - DNA, 201 bp, Homo sapiens
ggaaggcagggctcctgagggctgcagaggagaagtcattctctcctcacaggccctttaatgcctcagtttccccaagtgagcagttagaaggaataggsagtctcataccctaagactggtgtggaaagcgtttggagttctagagcttcggggcagctgtgaggaggccttctaggggggatgggtcaggggcatatg

SEQ ID NO: 556698 - DNA, 201 bp, Homo sapiens
gtggcatggcccgggccgtgtggaatcgcccccccttccttggcattctgtggcaggccccaggttccatgccgttgtctgtgttctgtggcaggtctagygtctttgccacttgcctggtgatttctatgatgaaatctgggctctgagccattgcctgtgttccgtggtaccccttgggcagtgccatcgcctatggtc

SEQ ID NO: 556699 - DNA, 201 bp, Homo sapiens
cagcccacgttgagcaccgcctggcctcacactcttctctctttccagtgtccattggaggccatggcctgggtgagtgccctttctctcctcttcttggwgtgggccagggtggttggcggtagggggcgggcagcgggaacagagagggctggctccagcccaccagctccctgagcaggatctcccgcatggcaggtg

SEQ ID NO: 556700 - DNA, 201 bp, Homo sapiens
ggcctgggggccaggatcccctgcagggtttgtcctcctccagctgtggctctccgctggctggtggcaggccctacctgatgagtgtgccagattccgcrgaggcaggaagaggtttaaaacccctcattttacagacaaggacactatggcccagagagggctggtgacttatccaagatcacacagcttatctgtggc

SEQ ID NO: 556701 - DNA, 201 bp, Homo sapiens
aaacctaaaaaggcactgagcgagcgcggggagacttaacccctgtctgtcctcctcctgcttcagcctgcggtggagggggcttccgcaagtccaggccytgccccagcccaccccctaccgcgggattggctgcagctaacggtctgggctgcggggagggagggaaaggcctgtggaagggaggaagtctttgagtgt

SEQ ID NO: 556702 - DNA, 201 bp, Homo sapiens
cagcctacggtcctgggctcgagggaggcactaccggtgagtgcctggagctggggaacagggtgacttctgggggtgcttggccactagtctggtgctgytttgctccagaggtaggggccctgcttcctaagccaggagtccccacagaggctgtccagggagctggggcccagtccctcttgggccacaagcccttcc

SEQ ID NO: 556703 - DNA, 201 bp, Homo sapiens
gcccaggagcgcctgacacgcaccttcacacgcagcagccacacctacacccgcacggagcgcacggagatcagcaagacgcggggcggggagacaaagcscgaggtgcgggtggaggagtccacccaggtcggcggggaccccttccctgctgtgtttggggacttcctgggccgggagcgcctgggatccttcggcagc

SEQ ID NO: 556704 - DNA, 201 bp, Homo sapiens
tgttgggaagatagatgagtcatagggggcagaggccagagggacttatgtgcctggagtgggcacagccaagggtgtggggctgaggccagccccacccmaccacctgccttggagacaacttagctattaagagcctggccttggagtcacacctgggcttgaatcccaggtccactaactggggcaaattgcttcatc

SEQ ID NO: 556705 - DNA, 201 bp, Homo sapiens
cctcagaaacatgtgtctgcctccagatctgagcgctgaccacagagcctttcctgggataaggccagggtggggaggctcccgccctgccaacctccatsccggaacctgtgctgactggtctctctccccaggtgactatgaggtctccatcaagttcaatgatgagcacatcccagacagcccctttgtggtgcctgt

SEQ ID NO: 556706 - DNA, 201 bp, Homo sapiens
tgtttggggacttcctgggccgggagcgcctgggatccttcggcagcatcacccggcagcaggagggtgagcaccgcacactgggccggccgggtcctcayggcgggatgggagggtgctgcggaccaggcttgatgctggcagactggccccgaaggccagggcaggtctgagcagaggaggaggtttaactgatggggg

SEQ ID NO: 556707 - DNA, 201 bp, Homo sapiens
gccagcctgcctgtggagttcaccatcgacgcacgggacgcgggcgaggggttgctcactgtccagatcttggtgagtctctgtgcatcccaccccgcagrtcatgctccaggcacaggcgggccttgacctctgcttctccctcaggaccccgagggtaagcccaagaaggccaacatccgggacaatggggatggcacg

SEQ ID NO: 556708 - DNA, 201 bp, Homo sapiens
caaccagcccgtggagaacgcccgggaggccatgcagcaggccgacgactggcttggggtgccccaggtacatgcgcagatggggcaggggggaaaggggrcaggggcagaggttgggtctgtaagtttacctggccagggtgcagggggagactggggctgctgggaaaagagggcgccatgtgacatcactcctttcca

SEQ ID NO: 556709 - DNA, 201 bp, Homo sapiens
tctgtgtgaaggctgcccccacccctgctgaacacgccacccctgggctccaggtgtcctgcgggaggtgaccactgagttcactgtggatgcaagatccytaacagccacaggcggcaaccacgtgacggctcgtgtgctcaacccctcgggggccaagacagacacctatgtgacagacaatggggacggcacctaccg

SEQ ID NO: 556710 - DNA, 201 bp, Homo sapiens
tggtgtcacttgccctccacgcagaggtggctgtgggacaggaacaagcattctctgtgaacacacgaggggctggcggtcagggccaactggatgtgcgratgacttcgccctctcgccggcccatcccctgcaagctggagccaggcggtggagcggaagcccaggctgtgcgctacatgcccccggaggaggggccct

SEQ ID NO: 556711 - DNA, 201 bp, Homo sapiens; identical to SEQ ID NO: 406185

SEQ ID NO: 556712 - DNA, 201 bp, Homo sapiens
tcacaggaacacactctggcctcctagccccttgtctggagctcaagaccttggctttgcaggtccaccactcactgtgtgtccagaaactcagacacagyccactcctcttggcggctcaggccagccttgggccttcttgcacgcatcgtctgcagaactcccctgccctctgcagacccagctgcccgggcaggtcat

SEQ ID NO: 556713 - DNA, 201 bp, Homo sapiens
ccccaactcagccttcttccctccgcacaggtgaaggcctttgggcctggcctggagcctaccggctgcatcgtggacaagcccgctgagttcaccattgmtgctcgtgcagctggcaagggagacctgaagctctatgcccaggtaggtcattgtccagtctctgctgcccttactacccatggcagggaccctggaagg

SEQ ID NO: 556714 - DNA, 201 bp, Homo sapiens
acaaacacctgccttgggggtgaagtgaaggcccagcctccccaccccaccgcgccccaggggttggaggaccttgtctgtgtcaggacagtgtccctccytgggaatgtgacatgagggccgactggggccaggctcaggggcagaggctgggacacaaggggctggcgagggctgcgaggccagggaagccctgagttt

SEQ ID NO: 556715 - DNA, 201 bp, Homo sapiens
tgaggggattgaggagctgggacttcaaggatattgatctgccttcttccccaccctgcccccatctcctcagagggcacagaggagccagtgaaggtgcrggaggctggggatggtgtgttcgagtgcgagtactacccggtggtgcctgggaagtatgtggtgaccatcacgtggggcggctacgccatccctcgcagg

SEQ ID NO: 556716 - DNA, 201 bp, Homo sapiens
gttccccaaggccaagctcaaacctggtgcccctgttcgatccaagcagctgaaccccaagaaagccatcgcctatgggcctggtatgtgtgagcccctgrcggccctcctgggcagctgggcacatgtaggctctccctgagtaacctgggctctgctcctgccccgtaggcatcgagccacagggcaacaccgtgctgc

SEQ ID NO: 556717 - DNA, 201 bp, Homo sapiens
atgagacagacgagatgccgtccacggagaaggacctggcggaggacgcgccgtggaagaagatccagcagaacacattcacgcgctggtgcaatgagcayctcaagtgcgtgggcaagcgcctgaccgacctgcagcgcgacctcagcgacgggctccggctcatcgcgctgctcgaggtgctcagccagaagcgcatgt

SEQ ID NO: 556718 - DNA, 201 bp, Homo sapiens
ggagagcagcgcagcgcagcgagtcccgtggtcgcgccccaacagcgcccgacagcccccgatagcccaaaccgcggccctagccccggccgcacccccakcccgcgccagcatgatgaacaacagcggctactcagacgccggcctcggcctgggcgatgagacagacgagatgccgtccacggagaaggacctggcgga

SEQ ID NO: 556719 - DNA, 201 bp, Homo sapiens
cccggccctcccacccatcgacaagggccatgggcactgcctgcacacccctctggggacagcgagcactccctgggtgccccggggagtccaggccttasggtttgcgagccctccagctgccgcctccccatgcacattcccacctcccgcctcggctcaccgttccctttccttccatcgggcaaccctagcccacac

SEQ ID NO: 556720 - DNA, 201 bp, Homo sapiens
aagggccagggctaggaggaatcccagtgttgccctgacatcccccaaaccctgcaggtgaggccagctctcaggacatgactgcacaggtgaccagcccrtcgggcaaggtggaagccgcagagatcgtcgagggcgaggacagcgcctacagcgtgcgctttgtgccccaggaaatggggccccatacggtcgctgtca

SEQ ID NO: 556721 - DNA, 201 bp, Homo sapiens
tccgctgctcctacgtgcccaccaagcccattaagcacaccatcatcatctcctggggaggcgtaaacgtgcccaagagccccttccgggtgcgtcctccsggcctgccccgtgcccaccaccaggggtccctgagggagggcggaaccctcgctggagtccctgttgtccctgggctcaggctgggactgaggcttgggc

SEQ ID NO: 556722 - DNA, 201 bp, Homo sapiens
acggaagggtcttgcctgatgctggatccccgaccctcccccaccttgccccaggcttctccatcgaggggccctcacaagccaagatcgaatgtgacgayaagggggatggctcctgcgatgtgcggtactggcccacggagcctggggagtacgctgtgcacgtcatctgtgacgatgaggacatccgagactcaccct

SEQ ID NO: 556723 - DNA, 201 bp, Homo sapiens
tgccagtgaaggatgtggtggaccctgggaaggtgaagtgctcagggccagggctgggggctggtgtcagggcccgggttcctcagaccttcacagtggaytgcagtcaagctggccgggcgcccctgcaggtggctgtgctgggccccacaggtatagaatggccggggcagggaggagggaggtggggcgggacgcccg

SEQ ID NO: 556724 - DNA, 201 bp, Homo sapiens; identical to SEQ ID NO: 406184

SEQ ID NO: 556725 - DNA, 201 bp, Homo sapiens
gcagtgcgcatgctggggagcgctggggtgagcagggagataggacatgagggcagctagaggggagctgggggacggaagggtcttgcctgatgctggayccccgaccctcccccaccttgccccaggcttctccatcgaggggccctcacaagccaagatcgaatgtgacgacaagggggatggctcctgcgatgtgcg

SEQ ID NO: 556726 - DNA, 201 bp, Homo sapiens
ggtctctctccccaggtgactatgaggtctccatcaagttcaatgatgagcacatcccagacagcccctttgtggtgcctgtggcctccctctcggatgaygctcgccgtctcactgtcaccagcctccaggtttgtgcccagggtgggggtggagggtttctgctatctgagagatgggcaggagttgaggacagcaggt

SEQ ID NO: 556727 - DNA, 201 bp, Homo sapiens
caatcatagctcagtagaactgttaacaaaacaaaaaggctctgccctgggagccttacaatcccacaaggccagaaagaaaccaggtaattacatagacrggaggcagactcacttgctgtagctgaggtgagggtaccttccagaaccacaggaacacagagaagcagccttctgaccggaagggccccataaagaact

SEQ ID NO: 556728 - DNA, 201 bp, Homo sapiens
atcgccaccatcggcagcacctgtgacctcaacctcaagatcccaggtagaagcctggaggaccctgggtggggcgggtggtgggagagggctggcccggsccagagcccacctgtcgggcctccaccctgcttcctcacccctcgcttccctccctcaccctggctcccttgaccacacaggaaactggttccagatggt

SEQ ID NO: 556729 - DNA, 201 bp, Homo sapiens
tgctccaggcacaggcgggccttgacctctgcttctccctcaggaccccgagggtaagcccaagaaggccaacatccgggacaatggggatggcacgtacrctgtgtcctacctgccggacatgagtggccggtacaccatcaccatcaagtatggcggtgatgagatcccctactcgcccttccgcatccatgctctgcc

SEQ ID NO: 556730 - DNA, 201 bp, Homo sapiens
gtgtgaggcagggtgcctcagaggaagcaaagggggcccttttggaggctgcccctgtccatgctgggtcccctgggtgtgtcctgagccagcatctagcygagagcaggggtgtgttcccctcgagagccctgactgagcctcctccacatccaggagatccccgccagccccttccacatcaaggtggacccatcccac

SEQ ID NO: 556731 - DNA, 201 bp, Homo sapiens
gccctgcatcctggccggctggctgcccctcaccatcgtctccctccatcacctctccaggtctctgccccgactgggaggcctgggaccccaaccagccygtggagaacgcccgggaggccatgcagcaggccgacgactggcttggggtgccccaggtacatgcgcagatggggcaggggggaaagggggcaggggcag

SEQ ID NO: 556732 - DNA, 201 bp, Homo sapiens
actctccacctttttctttttccctactgttccttttaatccaaaagtttggaaatctttgctatagtggattaaaacatgattcgccttgtttttttttkttttttttttttttgacagagtctcactctgtcacccaggctggagtgcagtggcgcaaactcggctcactgcaagctctgcctcccgggttcacgccat

SEQ ID NO: 556733 - DNA, 201 bp, Homo sapiens
taaaagtctccctgtctctattaaccacacaagatataacgtctgtagaacttggtctatttggggcaagccagactacctgatgcactacagtagaaagycccatagaagttttccttagaagcagacagatggttctcctgggacaatattgaacatttactgtatgatggagaatattatttataaataatgtttctt

SEQ ID NO: 556734 - DNA, 201 bp, Homo sapiens
taggccattgatgagcacattggacctaaccctggagactacctctcctctcccctgactcattccaggaagttcttggggcccctgtcatacctatgtcrgcctaattattaggcagagtattataggaaaatcttaagatcatggggcagggtggaaagaactgggatactgccacccctcaacccctgtaacaactgt

SEQ ID NO: 556735 - DNA, 201 bp, Homo sapiens
actaagcaggacagcctggacatctacaatgaaagggatctcttcaagactgaggagcccgccacagaggaggaagaggagtctgctggtgatggagaacraaccttggatggagagctagacctgctagagcaggaccctctggtgccacctccaccctcacaggcacccctctctgctgagcgggtggcttttcccaag

SEQ ID NO: 556736 - DNA, 201 bp, Homo sapiens
ggatgggtttttcctaacaatacggagacctgtgcactggcccctttaaaactggcacttcagatgtgctacttgagttaccagggaaaatgaaagtacargtcaggctgtgtcagggccacaactgcatgcaggcacctctgtgtatcagtcaacactcttggttaaaagtaaccaaaactagctggactacactcatgc

SEQ ID NO: 556737 - DNA, 201 bp, Homo sapiens
ctcctcagcaatgctaagagttgttataagttttattctcatttttccaattaggaaacaaattcagagatattaacaaaattaacatgctggtgagaccycttaagtaagcatcagaggcaggatcagaacacaggcttccctgtgaatacaaattgctttccattcctccagccaagcagggacttggggattacagag

SEQ ID NO: 556738 - DNA, 201 bp, Homo sapiens
taaatttaatttccttgaagtgttagctgatggagtgtatagttttacttctttagggaagtatttatattttaatagttttaaacactgaaaaatgtcaygacttaaagaaatgaagtggcaatgatgaatttttagctctgtgtcaggtggatccaggggttgttttttgtgaaacaacctgcttgtctggccaggcgt

SEQ ID NO: 556739 - DNA, 201 bp, Homo sapiens
tattaagcctatcaaagacaccttagacttctcagtgcagtatctgttggctgaagggctcttgttcattcatttattaaaacatttactaatattctttycccctttcccccatactccaagcggccagtatacttactgatattctaaatactaaggataatatggtacaccagacatactggagctggagcccagtgg

SEQ ID NO: 556740 - DNA, 201 bp, Homo sapiens
ctgggttgtcctatatacagaccacatctggatttgggagagcagaatggagtctccacattctggtattaagcctatcaaagacaccttagacttctcartgcagtatctgttggctgaagggctcttgttcattcatttattaaaacatttactaatattctttccccctttcccccatactccaagcggccagtatac

SEQ ID NO: 556741 - DNA, 201 bp, Homo sapiens
ctccctccagataaacagaggttttgtattttttttttaataaaaataattttttcttacagacaggcctccctgtgttgcctgggctggtcttgaactcmtggtctcaagcaatcctttcaccttggcttcccaaaatgttgggattacaggcatgagccattgtgcctggccaggatttgctttttaaaaaataatgaa

SEQ ID NO: 556742 - DNA, 201 bp, Homo sapiens
ctttaaaaaccgtaattaaatgttgctggagttctgcctggggcggggaaagatgggcatggtctggtgacacaggaagctggaggaatcggcaaggagcraatcataatctatatgctaacacacaattactgggcacctatcctgtgcccagcaccctgttaagtttgtctaggccctcatttaattatctccacccta

SEQ ID NO: 556743 - DNA, 201 bp, Homo sapiens
atctggagggtgacaccagtgccagcgactggctgcccaggtatttgggtgaacattgccaagggatgagcttgccaaaagagagacggaaacaaagagawcagtggagcatttcttcagataggctcataagtgggaactctggaggtttccctggcacagaagttcaagtttcccaagttctggctctcttgtgtatat

SEQ ID NO: 556744 - DNA, 201 bp, Homo sapiens
cctctgatggtgctgttctccctagtccttctttgggaagggtggggaataagttggggtctctacaggatacactggggaccctcctccgagataagtastgtagtccctctgagatctgctgtggtctgtcatgtcctagatagcctcaggctgggagtggggaagatgccaatggttcgggttagaggaaagaaaaga

SEQ ID NO: 556745 - DNA, 201 bp, Homo sapiens
gacttaaccaaggtcacacagtgagtcattaacacagctagggtagaaacctagatctgactcccagcttagtgctcttttcaggtcacccctcacaaccragaaaaaaaagcctttggtcacctggaaagtggcattgccaaaccatgtatttcttgccatagggggaagaggtggtaccagagacgccatgtgaaatcc

SEQ ID NO: 556746 - DNA, 201 bp, Homo sapiens
gggaaactcaactgcataatttgtggtgctgagggactgtcttttcactaaaaaagggtttagagaactaaaggaaacatatgataggcacataacaagcmaggatgcaacttctgctataagacataaagcacaattatctattaaattcttgtaaatttttaaaacacaaaaatgttttatcctgcaaatggcacatct

SEQ ID NO: 556747 - DNA, 201 bp, Homo sapiens
ttgaggagagagaagatggtatgaaatcagccttttggagagcaggaaggcaaacatgccaggattgccaggctctgttgaatgtccatttaggacttacrtccatttaagcagcagattagttgtgtgggacagagggaggcgggttattcttccctgcctcagggtctcatggcagtggccccttgccctgtaatagag

SEQ ID NO: 556748 - DNA, 201 bp, Homo sapiens
gtggcctgaggccactttgccgaggacctgtaagcaaaggtagagagcttgaagttgactcgcagtcaaagggaaggcagcctttggagatttgaagcagkggagtgatatgatctgatttatgtttctaaaaacattagcttctgtgtaaagattggaccagaaaagcatagacgcactctacggagattagttagaaaa

SEQ ID NO: 556749 - DNA, 201 bp, Homo sapiens
cattctagaggacaatttttttctttcttttttgaagacagggtcttgctttgtcacccaggctggagtgcagtgcactcggcctgaagcacggcccatcrcagcctcaagctcctgggctgaagtgatcctcccaccttcccaagtagctgggtgtaggtgggaccacagacatgctaccatgccaggctaatttttgta

SEQ ID NO: 556750 - DNA, 201 bp, Homo sapiens
caagtgatcctcctgccttggccctccaaagtgctgggactacaggtgtgagccaccacacctggcctcaacatgtttcagtatcaataaatgcttggccrggtacggtagctcacatcttgtaatcccagcactttgggaggccgaagtgggtagatcacctgtcaggagttcgagaccagcctgaccaatatggtgaaa

SEQ ID NO: 556751 - DNA, 201 bp, Homo sapiens
agttcttcatcttctgtaagatgagggtacatatacaatgttctggagagagatagagagagtaggaaagggcatttttatttcttttcttctttctttcttttttttttttttaagagacagagtcttattctgttaccccaggctggagtgcagtgacatgatcatagctcactaaagcctcaaactcctaagctcaaa

SEQ ID NO: 556752 - DNA, 201 bp, Homo sapiens
tttatgatataccagcctgatctagtaaaagactaaaacaaagtgcgatccttcatcccctctgtattagttagggttctcttagagggatagaactaatrtgataaatagatagatatatataaaggggagtttattaagtattaacttacacaatcacaaggtcccataataggctgtctgcaagctgaggagcaagga

SEQ ID NO: 556753 - DNA, 201 bp, Homo sapiens
tggggaaagaggctgattggtgtccacagaacgggtcatcctatccacttgattattaaactccttctctgctttggtcacccactggtgaacactcacayggagtacaaatatcttcatagtttttgaccactcagagaggtccatccacatacttctttccccaatttttttgtcaccaattttccaatcatgcttctt

SEQ ID NO: 556754 - DNA, 201 bp, Homo sapiens
tccccaatttttttgtcaccaattttccaatcatgcttcttccaagtccctgaccatccagccaaatcattggctatagcccatgaatcagtatttaatcrcacatcttaccatttatccttccatgcaaagtacacagccaggtgcactgctcaaagttctgcccactgggaagatttcccttcactgctgtccttcagg

SEQ ID NO: 556755 - DNA, 201 bp, Homo sapiens
tccaccaaagaccagtaacaggccaagagctgtctctcaaaagtaaagtagttatctgcagaagatggcagggccttgctccaaaatcctaaaggcctccmctgtgattcatctctgggagcctgccaaaggcaccaaacagcatccccatctgccactgacacctcaagcaccattggatctgctgggtcatatggccca

SEQ ID NO: 556756 - DNA, 201 bp, Homo sapiens
tgcagaagatggcagggccttgctccaaaatcctaaaggcctccactgtgattcatctctgggagcctgccaaaggcaccaaacagcatccccatctgccrctgacacctcaagcaccattggatctgctgggtcatatggcccaagtggcagagcagcttgcacaacagcctgggcctgttgcagagccttctcttgttc

SEQ ID NO: 556757 - DNA, 201 bp, Homo sapiens
gcccagctaattttgtgccaccatgtccagctaattttgtgccaccatgtccagctaattttgtttatcttttgtagaaacagagtctcaccatgttgccmaggctggtcctgaactcctgggctcaagtgatcctcctgccttggccctccaaagtgctgggactacaggtgtgagccaccacacctggcctcaacatgt

SEQ ID NO: 556758 - DNA, 201 bp, Homo sapiens
agccattaaaataataattgatctaaatcaatatatttattttttatttttttatttttgagacagagtctggctctgttgcttacgcttgagtggcacamtctcagctcactacagccttgagctcctgggctcaagtgatcctcccaccccagcctctcaagtagctatgcctatggtcataggcatgccctaccatgc

SEQ ID NO: 556759 - DNA, 201 bp, Homo sapiens
gcaattggagtcaccacttggttaagcttacgataatccactgacattctccaagattcatctgtcttctgcacaggtcaaatgcgagagttgaacagggwtgtggtgggaatcaccactcctttgtctttcaagtccttgatgatggcactgatctccacaatccctccagggatgtgatattgtttttgacttactatt

SEQ ID NO: 556760 - DNA, 201 bp, Homo sapiens
tcatttttggctcccatctcacaaggcaggcctaatagggggaactgcctcttgactgcagaggaaattgagtgactctgggggtttatagcacctggatggtgttccttaaaaaagtcgatagtttctttttttttttttttttttttttgaggaggcccgcaggaattcctttcctaaattctgtgatatttcccatac

SEQ ID NO: 556761 - DNA, 201 bp, Homo sapiens
cagtgtgttaagaaacaggaaggtgaggaggtattatttcatacaggaaggcctcacctaaactgaccaacattgacttccaggcttctgtgggaattaawgccttgtaggtattaagataatgatggatgttccctactataggaagctggagacaacagccagttctgctggaggaacctcttttcctgcatcaacctc

SEQ ID NO: 556762 - DNA, 201 bp, Homo sapiens
aggagttggtttgaggagagagaagatggtatgaaatcagccttttggagagcaggaaggcaaacatgccaggattgccaggctctgttgaatgtccattkaggacttacgtccatttaagcagcagattagttgtgtgggacagagggaggcgggttattcttccctgcctcagggtctcatggcagtggccccttgccc

SEQ ID NO: 556763 - DNA, 201 bp, Homo sapiens
tgagcacttcttggagatgagcaggaacaagttcatcggattcaccctggggcagtaagtgactgaatggctggaactggctacagagtggttcctagggkgccagaggagcaggtagcttggaatgagggatggtgcctggtggtcataatgtaacctagagcccctaggccatggacaactcccagtgactactttggg

SEQ ID NO: 556764 - DNA, 201 bp, Homo sapiens
gaaagacaggacagtatgggctgtgtgtggaggacagaggggatgttgaaggtgaggctatagactgggttcaggccagaacattttgggtccttttcccrtaccttattctttctcagtgaaataaggaaagcttttggagaaaataattttggcaggggagctgagatcagaggtggatatgctatgaggagcctttcc

SEQ ID NO: 556765 - DNA, 201 bp, Homo sapiens
ccaaaggcccaagatggggtagtctatgtattcaaggctcgttaagttggtctggcagtcagaactcctgggtttgaaattccttctgttgattgctgccyttttccactgctccagtcctctgattggagggataggagcccggaaagtttttctctctcaaagtttgcttttcttcccttctctgggattggtctttcc

SEQ ID NO: 556766 - DNA, 201 bp, Homo sapiens
cagcaagcttctgtcctcctcttcctcagtcagccagctggtgtatgctcacagaaggcaaactaattgaatgttcacctaagcagagcataattaggaargaaagtgctggcaaaaaaaggcatcactgctttctgaaagctaagtaattgtgactttgggattatctatgctatgttccctggctaatggcagggttac

SEQ ID NO: 556767 - DNA, 201 bp, Homo sapiens
tttactgtcagccagccacactcttaactggccctggaaccaaaggcttacatttaagagatgactgggtaggggtctatgtatataaccatgtgacactwaacgacagggatacaatctgaaaaatgtgtcattatgcaattttgtcactgagcaaacatcatagagtgtacttacacaaacccagatggtatagcctac

SEQ ID NO: 556768 - DNA, 201 bp, Homo sapiens
gacctcagtgcctggagttccttacattctgaacaacaattaagggtataatcctggggatagggacccaggataccggaacaggtctccaagcaaatccrtttttctggggtaaggcattttactattttgaagcaccaggaagttttactgtcagccagccacactcttaactggccctggaaccaaaggcttacattt

SEQ ID NO: 556769 - DNA, 201 bp, Homo sapiens
atcctgggcttcaggggcctatcctgagtgggttctctttttattcaaggactttcttagctcagcctaactctggaattcaagagggaaactattttgartgcatgacccaagaaagacaggaaatcaattcctgtcattgtgcccaattctttccctcatgggctatagttctagaggtggccttatttgctgctacca

SEQ ID NO: 556770 - DNA, 201 bp, Homo sapiens
tttagtttagcaccctcatccaatgactaacaggagttagtggatggatagcctgactgtctcacccctcttggatagaataactgtgagttgtgtgtttyatactgtttccaaattatcccctgagtgaactctttgggcttccttttcttccctatctctactgatgattcctgggaatgattcccaaataagctactt

SEQ ID NO: 556771 - DNA, 201 bp, Homo sapiens
tatctaaactggtgacttctatgctcagaaaaacactaatgttcatatgagtaagatatatctgtttttttcaggcttaacaaattgcaagcacagaaaaygtactggctatttgaatatatagaattttcttttcttttccttttttttttttttttttttttttttttgagacagagtcttgtgctgtcacccaggctg

SEQ ID NO: 556772 - DNA, 201 bp, Homo sapiens
ttttgcttgaattttgaatgagcccagtcatgggctgcaataactagtgagtctattccacataggtcctcagtatggtttatctaaactggtgacttctrtgctcagaaaaacactaatgttcatatgagtaagatatatctgtttttttcaggcttaacaaattgcaagcacagaaaatgtactggctatttgaatata

SEQ ID NO: 556773 - DNA, 201 bp, Homo sapiens
tagcagggaagctagcaatgttgtttggattacatacattcccaaatgatgcaagtgcaaggtttatcattgcaacattgtttataataatgaaagcttgkctgggctccgtagctcatgcctgtaatcccagcactttgggaagccgaggcgggcagataacaaggtcaggagttcgagaccagcctgaccaacatggtg

SEQ ID NO: 556774 - DNA, 201 bp, Homo sapiens
ccctcatttaattatctccaccctatgaagtagtcttatttaatacctcttttatacatgatgaaatcgaagctaagaaaaattaagaagctgctttcccrtaaaacattgtttgccatgctaaggagtttggacttggtttcatgggcattgccaagatatagggacaagatggggacagcaaatggatgctcctgtctg

SEQ ID NO: 556775 - DNA, 201 bp, Homo sapiens
tcagggccttgaaaccttataaaggatacagatatataagtagccaattatagagagataagtgcactgatactgataagcactggttgctatggaaacayctaatccagcttgaggtggagaagaaatgactcctaacctgagtcctaaaaaaacagatgttagccaggatatgggaattgttagggaaggaggacagga

SEQ ID NO: 556776 - DNA, 201 bp, Homo sapiens
catatgcagtccattgttgactgaagcatcgttgtgcagcacatgactatagtctgctgtcctgaaaaggtcagaatgaaaagttatactgagatctgacyatgttcttacaaactcccctgcctgacccacttcagtttatcaacagggctagatagtagtgctcagtaatccagtctccattatctgcaataaaatttt

SEQ ID NO: 556777 - DNA, 201 bp, Homo sapiens
tgttgtgatgtgacactgtgatatcatgtcatatatagccatgtcttgctacagaatcattggcctggacctcagtgcctggagttccttacattctgaayaacaattaagggtataatcctggggatagggacccaggataccggaacaggtctccaagcaaatccgtttttctggggtaaggcattttactattttgaa

SEQ ID NO: 556778 - DNA, 201 bp, Homo sapiens
ggtgtggtaggaaaaagcagtaaatgacccggctcatcctgcccaggttggccctatgaccaacctgaaatcttagggtctctagtttggcctctgtcccycagccctgacagccccctgcgctgttgtgatgtgacactgtgatatcatgtcatatatagccatgtcttgctacagaatcattggcctggacctcagtgc

SEQ ID NO: 556779 - DNA, 201 bp, Homo sapiens
agctggcacccccaccctccaagctgcgaggccgccgtggctctcgaagggtatggactgaagcagacaatggtattgggacaccgactggccaaaaatcragattctaagttactctgggtgtggtaggaaaaagcagtaaatgacccggctcatcctgcccaggttggccctatgaccaacctgaaatcttagggtctc

SEQ ID NO: 556780 - DNA, 201 bp, Homo sapiens
gcacctgggttaccttttccccaaatcccagatgactcagaccattaggaagttgccctgtagctaatctcactgggttgggcttcccacagagaccatcyctgaggtctgtgactatgggctgggaattgccttgggaacctcttgtgactcttctgtaaccccagggtgctgctgagtgttatgtacctaatggtggaa

SEQ ID NO: 556781 - DNA, 201 bp, Homo sapiens
tagggggaactgcctcttgactgcagaggaaattgagtgactctgggggtttatagcacctggatggtgttccttaaaaaagtcgatagtttctttttttytttttttttttttttgaggaggcccgcaggaattcctttcctaaattctgtgatatttcccatactggggcagtaaataatgccttatcctgacccctga

SEQ ID NO: 556782 - DNA, 201 bp, Homo sapiens
agggggaactgcctcttgactgcagaggaaattgagtgactctgggggtttatagcacctggatggtgttccttaaaaaagtcgatagtttcttttttttyttttttttttttttgaggaggcccgcaggaattcctttcctaaattctgtgatatttcccatactggggcagtaaataatgccttatcctgacccctgag

SEQ ID NO: 556783 - DNA, 201 bp, Homo sapiens
gaagaagtccacctccctctgggccctcatttcctttctcataggtaaccactattaccagtttctagactacccttccaaagataatttctgcatatacragcttatgcatgtgggcatatgtgtattttttaaacctaagtgtcagcatgctgtatactaacttcatacattgctctttacaaaaaaaaaaaaaaaaaa

SEQ ID NO: 556784 - DNA, 201 bp, Homo sapiens
ctggagagaaataactcctgccctttccagatacagccaattcctgctgttgccatttacctaaagcctgtccttatctctgcatcttacagcatctcagwcctggattatccttgctgtaccatccaggatttgccggagcttactactgaaagtctggtaagcagatggggatttggtagcctttgaaattgctaggta

SEQ ID NO: 556785 - DNA, 201 bp, Homo sapiens
acctccaccctcacaggcacccctctctgctgagcgggtggcttttcccaagggcctgccctgggccccaaaggtcaggtaggtttgatagcatcagggacccctatgcttcggggtttcagtctccaaaggcccaagatggggtagtctatgtattcaaggctcgttaagttggtctggcagtcagaactcctgggtttg

SEQ ID NO: 556786 - DNA, 201 bp, Homo sapiens
aaggtctagggtactgggggtagatgttgttgaaagtagcatggtctgttgactctaggggggtattggggtatcagtagttctcgtactttggaagcttdtgatctggtatgtctggccttttacagggacacagatacattggttggattacccaggcccatccatgagagtgtgaagaccctaaagcaggtgactggg

SEQ ID NO: 556787 - DNA, 201 bp, Homo sapiens
tatgattatgtggaagttaagtgtggtctttgaaaggaggttgctggagaaggcagtggatgtgggctcagtatgtattttgcaatgcttagcatctgaatggttgttgagagcagtggtatgaaatgtaggctgtgcaaggaaatgctttgggggatggaaaatattaaatattttatatgtattatattgatatctttt

SEQ ID NO: 556788 - DNA, 201 bp, Homo sapiens
atgtgtcaggaaaggagccagaagaatatgaaagacagtgaagtggctggaaatccaggagattatgatatcatcataaaagctaagaaagtctttcaagaaaaaaggagtgatctgctgggtaaaatgctactaataagtggcattatggtaagaaccaaggtgcccattggatttggcaacatgaagatagtgaccttg

SEQ ID NO: 556789 - DNA, 201 bp, Homo sapiens
catttttatatccttagagtctagcactttgtctggtacattgaagagctcaataaatgtcaaatgattgaatcatggcatgcaccaatggttactacaaccctttgtcctccaattgtaattcctgcaaaatgttgagtcagaaaagtatattatgcaaaaatagaatgacaatctctgtggtacaggttttatagaacc

SEQ ID NO: 556790 - DNA, 201 bp, Homo sapiens
cttttcttttccttttttttttttttttttttttttttttgagacagagtcttgtgctgtcacccaggctggaatgcagtggtgtgatctcagctcactgmaacctctgcctcgtgagtccaagtgattttcctgcctcagccttctgagtagcggggactacaggcacgtgccaccatgcccagctaatttttgtatttt

SEQ ID NO: 556791 - DNA, 201 bp, Homo sapiens
tttcttttccttttttttttttttttttttttttttttgagacagagtcttgtgctgtcacccaggctggaatgcagtggtgtgatctcagctcactgaarcctctgcctcgtgagtccaagtgattttcctgcctcagccttctgagtagcggggactacaggcacgtgccaccatgcccagctaatttttgtattttta

SEQ ID NO: 556792 - DNA, 201 bp, Homo sapiens
aagggcctgccctgggccccaaaggtcaggtaggtttgatagcatcagggacccctatgcttcggggtttcagtctccaaaggcccaagatggggtagtcyatgtattcaaggctcgttaagttggtctggcagtcagaactcctgggtttgaaattccttctgttgattgctgcctttttccactgctccagtcctctga

SEQ ID NO: 556793 - DNA, 201 bp, Homo sapiens
tttcatctaataaagttcatattcacaattttcgagttgtcccaaaatgttcttcatagctatttttccaagtcagaatccaatccaggaccacaggttgyatccagttgttatatatatgttaattatttttgttttctgttttttgtttgtttgtttttttgagagggtcgctctgtcacccaggctggaaagcagtga

SEQ ID NO: 556794 - DNA, 201 bp, Homo sapiens
ctcttgggtctggtgctctggccaacttccaactgccagtaccttcatatgtttgcccaaggactttatttatctaagttttttaaaagaaagtctcactrtgtttccctggctggtcttgaactcataggctcgagctatcctcctgctccagcctcctaagtagctaggattataggcatgtgccaccatgctcagctt

SEQ ID NO: 556795 - DNA, 201 bp, Homo sapiens
aaggtttatcattgcaacattgtttataataatgaaagcttgtctgggctccgtagctcatgcctgtaatcccagcactttgggaagccgaggcgggcagmtaacaaggtcaggagttcgagaccagcctgaccaacatggtgaaactccatctctactaaaaatacaaaaattagctgggaaaggtggcaggcacctata

SEQ ID NO: 556796 - DNA, 201 bp, Homo sapiens
agttgaaaaaatttatagacaagaagttatcattgaaattaaatggtggcagacatgtccaaggaatattgtggggatttgatcccttaatgaatcttgtkatagataagtgtgtggagatggcaaccagcgggcaacagaagaatattggaatggtggtgatacgaagaaatagtatcatcatgttagaaaccttggaac

SEQ ID NO: 556797 - DNA, 201 bp, Homo sapiens
cagaagaaacctgttagccaggtgttggaaagggaaatgagatagcctagctggagtgaaaataagcctacgatcataaatataaggcgtgttaacagaamcaaccagttgggagctaaaaaaaaaattgtaaaataaaaaaataataaatgaagaggggaaagggtggacattaggtgaagagaagactagcaaatagga

SEQ ID NO: 556798 - DNA, 201 bp, Homo sapiens
gatactggaggcaggagtgagaagcagcttttacaaagaagttagagtttgagagcaggggaatcatgtgcacatcacaaaactagctgaggctcaaacartcctcctgccccagcctcccaagtagctaggattacaggcatgtgccactatgcccagcttctgcccaagggccttctctgcagcctatacagggcagcc

SEQ ID NO: 556799 - DNA, 201 bp, Homo sapiens
ggtggaaaggctgatggcagcatgggtcagggaggagatattgccactactggggatggggaaactgttcctcctggcaaaaaaggttcatcagagtttayaaactcagtgtgcccagcttcaccagggtcctcccacatgtccccattccaagtttcagggtcccattcttttccaataaatgccctcactttaacagta

SEQ ID NO: 556800 - DNA, 201 bp, Homo sapiens
ggtaccagaagatgtgttaatttgctcgagcaatgaaaccacatctagtacagcagctgcaattggagtcaccacttggttaagcttacgataatccactracattctccaagattcatctgtcttctgcacaggtcaaatgcgagagttgaacagggatgtggtgggaatcaccactcctttgtctttcaagtccttgat

SEQ ID NO: 556801 - DNA, 201 bp, Homo sapiens
ccaggtaccagaagatgtgttaatttgctcgagcaatgaaaccacatctagtacagcagctgcaattggagtcaccacttggttaagcttacgataatccrctgacattctccaagattcatctgtcttctgcacaggtcaaatgcgagagttgaacagggatgtggtgggaatcaccactcctttgtctttcaagtcctt

SEQ ID NO: 556802 - DNA, 201 bp, Homo sapiens
gtattgagaggctgctgttagcaaagttagattttcctgggcacagcagccctttgacaaccatagctgttctctagagttttttttgcagcctctgcttwgtggctgtgggcaggaatctaaacttctataccctttgaggaaacttagcagggagagaatgaactggttccaaccctgaagaaccatctagcacttact

SEQ ID NO: 556803 - DNA, 201 bp, Homo sapiens
catggagtcatcactccatgcatacgtgcacacgcatcaaaattctcagggcagtggtccaggggcaggggcctgtttctgacttccccttgcactttatwtgaagataaatgcttaggtatttgctgctcttcagcaaatgtagaaacagaattttaaaaaaacactgtgcacaaagcactttgactggtgctgatgatg

SEQ ID NO: 556804 - DNA, 201 bp, Homo sapiens
agattgaaaattttaaaaattcatatgtattaacatatacaggaaggaaatatcccaaaatgtttaagttagaagatgggattatattaaaacatatttamtaggattataaatttatacatacaacgtcatgggaaatgtaatctttactacaacttggagtggagatgttgcatcatttgacaatcctaaagttgcaga

SEQ ID NO: 556805 - DNA, 201 bp, Homo sapiens
tattttttatgtcacgctgaggcacagagaggttaacttgtccaagatcaaatagtatgtgacagagctgagattgaaaattttaaaaattcatatgtatkaacatatacaggaaggaaatatcccaaaatgtttaagttagaagatgggattatattaaaacatatttaataggattataaatttatacatacaacgtca

SEQ ID NO: 556806 - DNA, 201 bp, Homo sapiens
cctgtcttaaaaaaaaaaagaaaagaaagagaataatagaaaatatcactgcatcacatgcagtaaaggtaaatattttgttaaacttttgttccagtttktgtgtgtgtgtgtgtgtgctgggacgtaatgtaaaaggtatcatttttccaaaaagtttgaaaaacaatttttaatggctgttctttattctgagattct

SEQ ID NO: 556807 - DNA, 201 bp, Homo sapiens
tagtcttatttaatacctcttttatacatgatgaaatcgaagctaagaaaaattaagaagctgctttcccataaaacattgtttgccatgctaaggagttyggacttggtttcatgggcattgccaagatatagggacaagatggggacagcaaatggatgctcctgtctgtgaggagaccacagggaaaaaaggaatgct

SEQ ID NO: 556808 - DNA, 201 bp, Homo sapiens
tcacctcagacctcttttagccagatctggtttattgatctcaaactccttgacaaagttttaactggtctgtggtaaaatgaggaaaattcaggtcatcraagtgagtttttctaaaaatttagttcaatatattaaatttaagaatgtatacaatttaaaacagtgtttttcaaactgctatagggggcaacctgttaa

SEQ ID NO: 556809 - DNA, 201 bp, Homo sapiens
ccctcctccgagataagtactgtagtccctctgagatctgctgtggtctgtcatgtcctagatagcctcaggctgggagtggggaagatgccaatggttcrggttagaggaaagaaaagagtgggagaagttgggtttatgccgcccaccttatttctacacactgtccctcccactctgttccttccatcttcccctttg

SEQ ID NO: 556810 - DNA, 201 bp, Homo sapiens
gagtaaataaataaaataatttcagaatgatatgttctatggggggaataaaagtctctgcctgggtctcccttctaaagttgcaatctgttccccacctstcaagtcttcttcaggcaaaggctctgagagtacagtcctttgcttttgccagtactttgcagtgtccagagactcgaaagctttccacctgcaccgcgg

SEQ ID NO: 556811 - DNA, 201 bp, Homo sapiens
caatgcatgtaattagtcagtacatagtaactcttagtatattgctatcatcatcatcatcatcatcatcaagtggcagagctggtactagaaaccaggtytttggcatcccagaccttgccttaccatttgaatagcatttcagtttccaaagtgatttcatgtatgctttacattttgatgtaggtagagtaggaggaa

SEQ ID NO: 556812 - DNA, 201 bp, Homo sapiens
aagataaataagggtacagtcttcccttggcaacccctttttccaagttatcccagttaccaacaaaatttctctgttacagggctctgtggactgtcccrctctggagtttgagtatggagatgcagatgggcatgcagccgagttgtcaggtatgaggtagatgggtcagtagctagtggaagaatggccaggaggaga

SEQ ID NO: 556813 - DNA, 201 bp, Homo sapiens
ggacagcctggacatctacaatgaaagggatctcttcaagactgaggagcccgccacagaggaggaagaggagtctgctggtgatggagaacgaaccttgkatggagagctagacctgctagagcaggaccctctggtgccacctccaccctcacaggcacccctctctgctgagcgggtggcttttcccaagggcctgcc

SEQ ID NO: 556814 - DNA, 201 bp, Homo sapiens
atattaaatattttatatgtattatattgatatctttttatttttttattttttatttattttttttattgatcattcttgggtgtttctcgcagaggggratttggcagggtcacaggacaacagtggagggaaggtcagcagacaaacaagtgaacaaaggtctctggttttctaggcagaggaccctggggccttccg

SEQ ID NO: 556815 - DNA, 201 bp, Homo sapiens
tctggttttctaggcagaggaccctggggccttccgcagtgtttgtatccctgggtacttgagattagggagtggtgatgactctttttttttcttttttytttttttctttttatttttttttattgatcattcttgggtgtttctcgcatagggggatttggcagggtcataggacaatagtggagggaagttcagcag

SEQ ID NO: 556816 - DNA, 201 bp, Homo sapiens
atttcagctgaggtcactaagcaatttgggaaatggataggggctgctggagagaaataactcctgccctttccagatacagccaattcctgctgttgccrtttacctaaagcctgtccttatctctgcatcttacagcatctcagtcctggattatccttgctgtaccatccaggatttgccggagcttactactgaaag

SEQ ID NO: 556817 - DNA, 201 bp, Homo sapiens
tctaggcagaggaccctggggccttccgcagtgtttgtatccctgggtacttgagattagggagtggtgatgactctttttttttcttttttttttttttmtttttatttttttttattgatcattcttgggtgtttctcgcatagggggatttggcagggtcataggacaatagtggagggaagttcagcagataaacaa

SEQ ID NO: 556818 - DNA, 201 bp, Homo sapiens
ggacaatattgaacatttactgtatgatggagaatattatttataaataatgtttctttttttttttttgagatggagtttctctcttgttgcccaggctrgagttcaatggcgtggtcttggctcactgcaacctctgcctcctgggttcaagtgattctcctgcctcagcctcccaagtagctgggattacaggctcct

SEQ ID NO: 556819 - DNA, 201 bp, Homo sapiens
caaggtgggaggatcacttgaggtcaggagtttgagaccagcctgaccaacatgatgaaaccccatctctactaaaaattagctgggtgtggtggcgggcrcctctactcaggggaggctgaggcaggagaatcacttgaacccaggaggttgaggttgcagtgaatcgagactgcaccactgcactccagcctgggcgac

SEQ ID NO: 556820 - DNA, 201 bp, Homo sapiens
tgacaaaattttcttttcactttataccatatgctttgaatattgaaaactttgaacaataaaatatgaatggaatagttctctctctctctctctctctmtatatatatatatatatatatatttttttttttttttttgagacggagtcttgctctgtcactcaggctgtagtgcagtggcatgatctcagctcactgc

SEQ ID NO: 556821 - DNA, 201 bp, Homo sapiens
ataccatatgctttgaatattgaaaactttgaacaataaaatatgaatggaatagttctctctctctctctctctctctatatatatatatatatatatatttttttttttttttttgagacggagtcttgctctgtcactcaggctgtagtgcagtggcatgatctcagctcactgcaacctccgcctcctgggttcaag

SEQ ID NO: 556822 - DNA, 201 bp, Homo sapiens
aacaatcttgaaatttttttttctccttcctccttatccacttatttcacttgagaaccattactctcttttaagctatccagatctatgtccttaatctrgcagtaatttatcaaaaacccatatgataagagaattattctataatggtgttggtaaagaaaatctaaaatagaaaaaacatgccaacaattgattggc

SEQ ID NO: 556823 - DNA, 201 bp, Homo sapiens
tgagtacattcctacaatgttatttaaaactatgcatttatcagtaaacatacatgtatttcagagatatactgtaaacataccataaagtatatatccaytttccatgaggtatttatacaaaggaaggaccatggataaaatttttttagcattatatcaattttcctgttggtcactatttctataatgggttcttgg

SEQ ID NO: 556824 - DNA, 201 bp, Homo sapiens
agtagagacaggctttcatcatgttggccaggctggtctcgaactcctggtctcagatgatccacctgcctcagcctcccaaagtgctgggattataggcrtgagccacaacgaatggctataggattttctttaagtaacttttgaagtttttttcctgatattaaaataaatatacgtattgcagaaaactggagaaac

SEQ ID NO: 556825 - DNA, 201 bp, Homo sapiens
agcctgttgcattgtaattatgcatttgtgtctgtttcttaatttgactgtagaatccttgaatgaagaggtagtataatcatttttatatccttagagtmtagcactttgtctggtacattgaagagctcaataaatgtcaaatgattgaatcatggcatgcaccaatggttactacaaccctttgtcctccaattgtaa

SEQ ID NO: 556826 - DNA, 201 bp, Homo sapiens
atgtattgccatagctccttagataagccacaatccatacctccagcctgttgcattgtaattatgcatttgtgtctgtttcttaatttgactgtagaatycttgaatgaagaggtagtataatcatttttatatccttagagtctagcactttgtctggtacattgaagagctcaataaatgtcaaatgattgaatcatg

SEQ ID NO: 556827 - DNA, 201 bp, Homo sapiens
ataggcatgccctaccatgcccagctaattttgtgccaccatgtccagctaattttgtgccaccatgtccagctaattttgtttatcttttgtagaaacaragtctcaccatgttgcccaggctggtcctgaactcctgggctcaagtgatcctcctgccttggccctccaaagtgctgggactacaggtgtgagccacca

SEQ ID NO: 556828 - DNA, 201 bp, Homo sapiens
gatcacagctcattattgcagaattttctcatggctcttaacaatctagatgttctagatacttgtaaattaattttatgcccccttaggctagatttcarttcactaagagaatggaacaaatctatctttgatttcccacccccatttcctggtcgccggcaactactttgccatagggctttgtcagtgggaggtggg

SEQ ID NO: 556829 - DNA, 201 bp, Homo sapiens
cttggttaaaagtaaccaaaactagctggactacactcatgcagaatagcgactttgtcagaatgaaatgacgtgtcatcctgaggaacctaggacagcartgcagctctggacctcagggttggcctgtagtgtggggagcccagaaagcctttcacgtctatctgtaagacaccaggcctctgtatttccactccagtt

SEQ ID NO: 556830 - DNA, 201 bp, Homo sapiens
aaaacaatttttaatggctgttctttattctgagattctgtctttcattttttgaattttttaaagtttttaaagtccttacctatcagaataaaacagcmacaaccctatgtcatttgccactctccacctttttctttttccctactgttccttttaatccaaaagtttggaaatctttgctatagtggattaaaacat

SEQ ID NO: 556831 - DNA, 201 bp, Homo sapiens
ctccttttacctgccagtacatcccctattaccacagtacccaggtgccagatctgcttttcttctctccctctttttgctttcctgtggaaggcagtccktagaggagatgggatttttttcctctctagggcttttagaaaatcactagaagagaattactgtggcacaagtcaagagagcctcatcgtgtatcactgt

SEQ ID NO: 556832 - DNA, 201 bp, Homo sapiens
gtcatttgccactctccacctttttctttttccctactgttccttttaatccaaaagtttggaaatctttgctatagtggattaaaacatgattcgccttktttttttttgttttttttttttttgacagagtctcactctgtcacccaggctggagtgcagtggcgcaaactcggctcactgcaagctctgcctcccggg

SEQ ID NO: 556833 - DNA, 201 bp, Homo sapiens
tgagtgttatgtacctaatggtggaaaatattcgcctggagcgagagacagacccctgtgggtggagaacagcccgggagaccttccgcactgaattaagyaagaaatggcacttgaggaaggtgtggatggggtgctaatgggagaggggaagcagagcatctgcctaggagaggcagacagtcgttttttcttttgttt

SEQ ID NO: 556834 - DNA, 201 bp, Homo sapiens
aaattctccagttttgtcttctaagtctttgcatatattaatcagctattcattttttccaactttatttcttttaaccttttagaaatacaccttataawgccctactccttaaacttttccacttgtatcttgtaagaacaaggacatttttctaaaataaactaaaatgttgtcactctcaagaaatttgacattgat

SEQ ID NO: 556835 - DNA, 201 bp, Homo sapiens
aaagtggagccaaagagtgaactgaactctctgctcttccattcccttctttctgggaactgtggcctcatattttagctttggtgtctttaaaaaggttytttgtagggagtatttagtgaattttttgtgttgtttttttttttttttttttttttttttttttttgagacagtcttgctctgttgcccaggctggagt

SEQ ID NO: 556836 - DNA, 201 bp, Homo sapiens
acagtgagctgtgatggtcccactgccctccagcctgagtgacagagagaggccctgtcaaaaaacattttgcaagatctgtatcacttttttaaaaaatygtatataaagtacaagttatttttaataaacaggtaattacaaaagacactttaaaaatattcaaacagccaggtgcagtggctcatgcctgtaatccca

SEQ ID NO: 556837 - DNA, 201 bp, Homo sapiens
caacccagagggtttgaagggctaatgagagcacttttgttgattcctttacttgctcccaagtgtagggaagtaaatgctactaaggaaaatttgtgggrttttgttagtatctgtagggtctcaggtgagtaagctatgcttccttttaaaactcttacccctctttcctatacagactttttgtcgatggttagaaaa

SEQ ID NO: 556838 - DNA, 201 bp, Homo sapiens
ctgtgcccagtgacatgtattatttttgtccaagtatgtaatatgtgatgatcagatcaaatcaggtgatgatcaaattgagatatccatcacctcaaacstttatcatttctttgtgtagggaacattctaaatcttctctttcagctattttgaagtactcaataaattattaactatagtcactctgttttgctgtgt

SEQ ID NO: 556839 - DNA, 201 bp, Homo sapiens
ttgtatttttagtagagacagggtttcaacgtgttggccaggctggtcttgaactcctgacttcaagtgatctgcccgccttggcgtcccaaagtgctggrattaacaggcatgagccactgcacccggctctctcttatttcttaatctagcttaagctttgtcaattttgttgttgttgttgttaattttgaaatactt

SEQ ID NO: 556840 - DNA, 201 bp, Homo sapiens
aattgcaatgattatgaagcttttcccctaggctttcttctaagagttttatagtttcaggtcttacgtttaggtctttagtcctttttgagttaactttyatatgtgatataagggactaactttgttctttttcaggtgaatattcagttttcctagcaccattgtgtagtcttggcacccttgacaaagatcatttga

SEQ ID NO: 556841 - DNA, 201 bp, Homo sapiens
aaactccttcattttctttctaaagacaaaaaacttctggactttgtgaatccagctgtcattttacacacacctgcatacacacacacacagccacgcgygcacacacacacacactttcctattaaagagaaattactaaaggggaaagagtgcttggtctttgggaagttgagactagaatttatctgatgttcctgc

SEQ ID NO: 556842 - DNA, 201 bp, Homo sapiens
gttatattgaaaaatatttttaggtagtgatggttatcttatgtgcccctcagtttatttttttcttaattagtatcctttcaaaccatttttcttcccaytgtccgagaaaattatcaagaagtaatttgttgtaacaaatctagcaatttatctcgttttgtaaaattctcataaaggattagataaaagaagttaagg

SEQ ID NO: 556843 - DNA, 201 bp, Homo sapiens
gctcatcctatcactgcttagtcttgccatctgacccttggttgttttattcttgtaaaatgaagtcactggagtaagtagattaatgattcataacccaraggtaaattgcaagctgatatatccccagcagtgacgcagagtattgcgggaagcaagggataaaggagctgagttcctgccaggaaggagggctcacac

SEQ ID NO: 556844 - DNA, 201 bp, Homo sapiens
tcctgccaggaaggagggctcacacacaagacaatgcagtgtgcctggcaaaacacttgactagatcatctctacagtcctctgtaggttttaactgttcrtgctgttgcgatttcatgtttcacctcaaccttctctttgagaagcttagcatcctttagatataatcagtttcggaataaagaatgtttgggattttaa

SEQ ID NO: 556845 - DNA, 201 bp, Homo sapiens
acaactatgtagttcagccaaaattcatttgtcagaggtcattatgatataggattatttaaaaatgcttgtctcagaacttctgggatttcaaagaatcygggaagaccccactgtgcagtgctgtcattggccttattgattcctttcttttattttgattcaatttcagtttattttagagatagggtttcactctgt

SEQ ID NO: 556846 - DNA, 201 bp, Homo sapiens
tgtgaccaacaactatgtagttcagccaaaattcatttgtcagaggtcattatgatataggattatttaaaaatgcttgtctcagaacttctgggatttcraagaatccgggaagaccccactgtgcagtgctgtcattggccttattgattcctttcttttattttgattcaatttcagtttattttagagatagggttt

SEQ ID NO: 556847 - DNA, 201 bp, Homo sapiens
taactcaggttatgtgtactgtgtgaaagttgagtagaatggtaaagtataatataacctgaaatcatttttaaaatggaatttataatttttaatattaytgtaaaagcagttcaggaaagtactcattgggacctagttaaagtgagctgtcttacagaaccacagaatataaaattgataataataatatataacaga

SEQ ID NO: 556848 - DNA, 201 bp, Homo sapiens
agactcccaaagtgctaggattacagacatgagtcactgtgcctggccaaggctctctttaagtggtcactaaatggcatttgtaaccaaaagtaatgtgygtggtggtttttttctttccggaagattttgtctactggaacaaaagcgtgttttaactgtagtaataactatagtgttttaacatccatttgaaattgg

SEQ ID NO: 556849 - DNA, 201 bp, Homo sapiens
gaccatgctccacctagggagaggagagcacctagggtgcagattttaaggaggtcctggccttaagaatgagttccccctggccaggtgcagtgcctcaygcctgtaatcccagcactttgggaggccgaggtgggtggatcacgaggtcaggagttcaagaccagcctggccaagatggtgaaaccccatctctactaa

SEQ ID NO: 556850 - DNA, 201 bp, Homo sapiens
actcaggttatgtgtactgtgtgaaagttgagtagaatggtaaagtataatataacctgaaatcatttttaaaatggaatttataatttttaatattactrtaaaagcagttcaggaaagtactcattgggacctagttaaagtgagctgtcttacagaaccacagaatataaaattgataataataatatataacagata

SEQ ID NO: 556851 - DNA, 201 bp, Homo sapiens
ccaagatctatcattctagtcattttataaatacaccatcacctttcccctccaatttggtcagacttcagcatggttgtatgcagctgcttctcctcttrtcagatctaggtgctttgcatctctcaatcttctgaaatttctgggaccttgatcttttggtttatcctatgtcttgtctgcatctttagactcctttac

SEQ ID NO: 556852 - DNA, 201 bp, Homo sapiens
catacggctgtgcgatacaccagcattgaattggttggagagatgagtgaagtcgttgatcgaaatcctcagttccttggtatgtgtaatctctctcctcygccacttctaacttgtcatttttctgatttttcttctcatctcttacttttgcatgtgttttcctttctgtttttttaacacggagtgtttatagaaact

SEQ ID NO: 556853 - DNA, 201 bp, Homo sapiens
tgatcagattctcattacaatctttttcttttcccagctgtgcttttcttctttgttccttttgtacttattgtaataaatatttggcaagtctgaatgcygtggcatttctgaaaaagcatttcttttaaaatcactgttttgttttaggcactgtgcatccccacctttcagctcctagaacagcagaatggtctccag

SEQ ID NO: 556854 - DNA, 201 bp, Homo sapiens
tcatttgaacccggagggtggaggttgcagtgagctgagatcgtgccactgcactccagcctgggtgacagagtgaaactccatctcaaaaaaaaaaaaaagaaaaaagaaaaaaagaatgagttcccccttaaattctgcatcataggtgccctcaaccacaggcacaggcatgctggtgcggtgttggtacttggataa

SEQ ID NO: 556855 - DNA, 201 bp, Homo sapiens
gaatgtctatagtctgttgtttctgacttcttttcttttctttttttttagtttttaaaggttaactcttaaatttcagcaatttgtagctaacccaaaaragtttacatcagatgtatagaattggaggttgggagaaatgggggaagggggttagtcttagttgtcatattgtttggaagaaatgtttctttgcttccc

SEQ ID NO: 556856 - DNA, 201 bp, Homo sapiens
tggagactaattaagccagctgttacctgaagttctggggcaaaggcaaattctaagaattcattcctggtaggtctttgtgttaaaatactctttaaaaagtggaaggccgggagcgatggctcacacctgtaatcccagcacctgggaggccaaagcagacagattgcttgagctcaggagttcgacaccagcctgggc

SEQ ID NO: 556857 - DNA, 201 bp, Homo sapiens
taacatagaattatgttattaacctttgttagattaaatgaaacttatctaaaattttaaatactactgaaatatattgtgtgggatgtaaaagactagtratttatgtaacacacacttcttgaattaattgcagcaaagtcttttattgccttgtggatcactctcactaactggcatgacagccattttgtaaaaata

SEQ ID NO: 556858 - DNA, 201 bp, Homo sapiens
gagaaagtgtgcttgaggtggtgggattatggtttggttttatacacttcagggatgtaggagttacaggcaaatacataaatcaaaatatggaaggtatacattggtttagtctaaaaagatgggctgtcttgaagtgggggcttacaagtcataagtggattcagagattctttaatctgcagttggttaaaggaacaa

SEQ ID NO: 556859 - DNA, 201 bp, Homo sapiens
cctcccaaagtgctgggattacaggcgtgagccacctcatccagcttggataacttttttaaaaattatttttatttttttggagacacagtcttgctgtktcacccaggctggagtgcagtggcacagtcatggctcactacaacctcagcctcgacttcccgggctcaagtgatcctcccacctcagcctcctgagtgg

SEQ ID NO: 556860 - DNA, 201 bp, Homo sapiens
acctaggctaatacgtaatcctttggatttggggaaggtgtttcagcagttggtggggttagaatggggattgcagcaagagggaggctgagtaggaaggrtctggaccttctgtctccacttgaacctaactgcctcttttggtttttctttttaacctattttattggagttctaagtcaagatttgtttaggagggaa

SEQ ID NO: 556861 - DNA, 201 bp, Homo sapiens
gttcaagatatagtctgtggaacaccaaccccatgagatattttttgccaaaaaaaagttattaattaaaattaggaaatggtataaatagtatattaaargctctgtgaagttgtataataagagagctgtttaattttgcctttcctagcagtgtctgttatttcactataaaaatattatttagtcacattctgtagg

SEQ ID NO: 556862 - DNA, 201 bp, Homo sapiens
ctttgacttaatttacaaattatgtaaattatcaatgttgttcaagatatagtctgtggaacaccaaccccatgagatattttttgccaaaaaaaagttahtaattaaaattaggaaatggtataaatagtatattaaaggctctgtgaagttgtataataagagagctgtttaattttgcctttcctagcagtgtctgtt

SEQ ID NO: 556863 - DNA, 201 bp, Homo sapiens
tttcaccttgttagccaggatggtctcgatctcctgacctcatgatccatccgcctcggcctcccaaagtgctgggattacaggtgtgagccaccgcgccyggccaattccctagcttttttagttggtcaacttgaagaaagctgggacgtttcagtctaaaataacattcttgctttccaaatgccagatgaacctatc

SEQ ID NO: 556864 - DNA, 201 bp, Homo sapiens
gaattctttcctctacattaataatggttctagctatataccgcccttaggataattaagaagatgggcactcagataattttctgaagggcttaattctrtacaattttttttttttgtagatatagagcttctctatggtctcaaacctggtctcaagtgatcctctctccttggcctcccttaatgatgagattacaa

SEQ ID NO: 556865 - DNA, 201 bp, Homo sapiens
tttttttctggctttgtctttttgaagtatgatggactcatgttcatttaggtccaaccaggtgtctcctttccaagtttcagaatcccattctttaccaktcagtttcctaactttcacatgagaagtgtggagggactgtaaattcacctgttgtttgtaattcagcaagtcacacaactaagtttggtatacgagttt

SEQ ID NO: 556866 - DNA, 201 bp, Homo sapiens
cttccccagctgtttcttcccacctttagagttgtttagacaaggaggagtaagcaaggaacttgttctgctttctatcgtggtcacattggtgatgctcrggacctgccagggtcagaatttatggatatctgaaccctgaccccgttcattctctcagtccacttccaatccacatcagtttgttgtctgccttggaga

SEQ ID NO: 556867 - DNA, 201 bp, Homo sapiens
gccctcctgacacatcatcccttgtttccacagcacactcagcattggaagcacactgcagacggtgtctcattaaagcagtagctcccttgaacccacargttaaaacgccagacttttatttatttgtttattttttctgagttcttattggcagacttcagaatgaggtacctgaggaaatatagaaacctctgcctt

SEQ ID NO: 556868 - DNA, 201 bp, Homo sapiens
ctgttatatgtggtgccagtctcctaaaactgaccctccagatgtaatgagcaaagagcttattcttatcacttttatgacctgaatgctgaagtgccagrttttgaccagggcaggaggtatgaattgaatatcccttatccgaaatgcttgggatttcggaggaaaaaacactttcagaagtgtttttcaattttggat

SEQ ID NO: 556869 - DNA, 201 bp, Homo sapiens
aggacgatagcttgagcccagaggttcgagcagcctgggcaacacaatgagaccctgtttctatctgttctgaaaacaaaacaaaacagaagtctcttgargaagggtaaaatttaaaacatgtaagacattaggatagcaaaaaaatctcggtctccagcactgtcctaactttcagggttttctgttatcctagtccct

SEQ ID NO: 556870 - DNA, 201 bp, Homo sapiens
cagtggcacatgcctgtagtcctgcctgggcaatgtagcaagaccctctctcttaaaaggaaaaaaaaaaacagtgacacttaaacttaaaaagcactttyaaccgttggctgttttattgccatctttctcattattatacttgtaaggtgattgaaataatggtttaaatatatagattaacattattcattttaagtt

SEQ ID NO: 556871 - DNA, 201 bp, Homo sapiens
acacctggccatgtcacattttattttgctgtatgtttggaccatgactttctggtacaactttcccccaacagctcttaaaaaaaaaaaaaaaaaaaaamcctaaaaattaaaatacttcatatatacaaaagaataagtatgaacacttactatttatttatttatttttgagacagagtctcctccctctgtcgccca

SEQ ID NO: 556872 - DNA, 201 bp, Homo sapiens
gccggagtgcagtggcaccatcttggctcactgcaacctccgcctcctgggttcaagcaattctcttgcctcagcctcccaagtagctgggactacaggcrcatgccaccatgcccggctaatttttgtatttttagtagagattggggttttgccatgttggccaggtttgtctcaaactcctggccttaagtgatctgg

SEQ ID NO: 556873 - DNA, 201 bp, Homo sapiens
tttccttttgattatatatttagctcttatggagatggctgtgaaaatgtaagttgactgaacttacctctataagggaacttttttgcttctagaaaatrtatttatgtatacccaagtgtattttgtgaatctgggagcttgctaggagatttatgattacttttcttttacaatttttttttttttttttggaggatg

SEQ ID NO: 556874 - DNA, 201 bp, Homo sapiens
ccatgtcacattttattttgctgtatgtttggaccatgactttctggtacaactttcccccaacagctcttaaaaaaaaaaaaaaaaaaaaaacctaaaawttaaaatacttcatatatacaaaagaataagtatgaacacttactatttatttatttatttttgagacagagtctcctccctctgtcgcccaggctggag

SEQ ID NO: 556875 - DNA, 201 bp, Homo sapiens
tattggctctaattttcctaaagcaaatgggaacctaggggaaaccctccaaagatggggtttggagtcaagtatgttggtttgaatcttgccacataccstattactttgaacttcagtttatttatcaagtgaaatagggttagtactaccagtctcataaggttattatgagataccaaatggaaatctaaagaagat

SEQ ID NO: 556876 - DNA, 201 bp, Homo sapiens
ttcctcttttttgaagatttgaaaatctttcataacaaataccaagtacttttatcttaatggttgtttagaaagaagccctttagcaatgctgtgtgtcrtcacagcctgttatttggccagaatataacctctgaaatcagtaactgtgagtacttaccgcctgtactcagggaaaacaatccaacacttgtggaagtc

SEQ ID NO: 556877 - DNA, 201 bp, Homo sapiens
ccttctgattcctttacctcttcattctctttagccacctggtcacacaatcacaccctggatcttgtctttactaaaaagccaccacccaggctgggcgygcagtggctcacgcctgtaatcccaacactttgggaggctgaggcgggcggatcgcttgaggtcaggggtttgagaccagcctggccaacatggtgaaaa

SEQ ID NO: 556878 - DNA, 201 bp, Homo sapiens
accacagaaggtagttgtgattaaatgagttaatattctacgaagaggttagaaaagttcttggaacatagagattaaaatgttagcaattgttatttaartattagtcacttttctctccttactttccaatactctattacaaccttacatcatcttcaccatcacagttaatagtcagagtccagacaggaacagatg

SEQ ID NO: 556879 - DNA, 201 bp, Homo sapiens
caactatgctgggtgtttggatttggaaatgaaccagacaaaaatctctgcttaccacagaaggtagttgtgattaaatgagttaatattctacgaagagsttagaaaagttcttggaacatagagattaaaatgttagcaattgttatttaagtattagtcacttttctctccttactttccaatactctattacaacct

SEQ ID NO: 556880 - DNA, 201 bp, Homo sapiens
tggactcaagagtctagaatcaagtggaaaaaccggaaaaaaggccaggaacctgaatacgacctaatagctgtttccgagggggcaacttccacggagavccttctgccctggtaacggccaaagaggaggagatggcgccagtcagggagcggccgtggcccagacagtgaggaagcgcgaaggcggagcaaccgagga

SEQ ID NO: 556881 - DNA, 201 bp, Homo sapiens
acattagtttaatttcaggcagttttcatattgctgtattatattctaatgagctctgaaataccactttggaagctttgtcacagcaatactaaactaacctaatttttttttttttggtaactcagtcattttttgtatatttgggtgtaatatgatctaaaaagtattaataaaagtataactattttcattatatta

SEQ ID NO: 556882 - DNA, 201 bp, Homo sapiens
aacattagtttaatttcaggcagttttcatattgctgtattatattctaatgagctctgaaataccactttggaagctttgtcacagcaatactaaactaacctaatttttttttttttggtaactcagtcattttttgtatatttgggtgtaatatgatctaaaaagtattaataaaagtataactattttcattatatt

SEQ ID NO: 556883 - DNA, 201 bp, Homo sapiens
taacattagtttaatttcaggcagttttcatattgctgtattatattctaatgagctctgaaataccactttggaagctttgtcacagcaatactaaactaacctaatttttttttttttggtaactcagtcattttttgtatatttgggtgtaatatgatctaaaaagtattaataaaagtataactattttcattatat

SEQ ID NO: 556884 - DNA, 201 bp, Homo sapiens
tagcttattttttaaataaaatttttattggggaaattgatacatgctccttgaaaaaattctaacagtatggaaaccttcaaagtgcaaaatgaaccccrtcctctctccctatccttatattttatttttgaaacagggtctcactctgtcacccaggctgaagtgcagtggtgtgatcatggttcactggaacctgca

SEQ ID NO: 556885 - DNA, 201 bp, Homo sapiens
ttaacattagtttaatttcaggcagttttcatattgctgtattatattctaatgagctctgaaataccactttggaagctttgtcacagcaatactaaactaacctaatttttttttttttggtaactcagtcattttttgtatatttgggtgtaatatgatctaaaaagtattaataaaagtataactattttcattata

SEQ ID NO: 556886 - DNA, 201 bp, Homo sapiens
tttgcaaaatttaatgatgatgctttggtatttatgtaacaccttaccatgacaacatactttcagaaactatgctttttaagtttctgtataatcctctwaaggtgacgttatctcttttatgaatgaaaaatggactttagagttacacaactgttaattcagaattggaactaaggccatctcattatttatcttgtg

SEQ ID NO: 556887 - DNA, 201 bp, Homo sapiens
gtgtcagaataggaaagatacagaagtgtttggaataggaaaccatggaatataaatgatctttaaattttttaatgacaaatttcaaatgcacagcaaayataaaataatgtcatagagaatatctgtatacctaccacctaaattccactattcatattttactatgcttgttttttatatctgtccacctacatgaaa

SEQ ID NO: 556888 - DNA, 201 bp, Homo sapiens
catattatctatatttcattacctcgtgcccaaatttttattgttgagaaattacagtcttgtttttaattaatgtgatttcatctgttttggaatttttwaaaaaaattatatttgggtttctgcattgtgtccatttctgttttcttacctggttggctgggctgttgtaggcccctcaaggaactcgttagaaagcaa

SEQ ID NO: 556889 - DNA, 201 bp, Homo sapiens
gtacaactttcccccaacagctcttaaaaaaaaaaaaaaaaaaaaaacctaaaaattaaaatacttcatatatacaaaagaataagtatgaacacttactrtttatttatttatttttgagacagagtctcctccctctgtcgcccaggctggagtgcagtggcacaatctcggctcacggcaaccttcgccctctgggtt

SEQ ID NO: 556890 - DNA, 201 bp, Homo sapiens
cacacctggccatgtcacattttattttgctgtatgtttggaccatgactttctggtacaactttcccccaacagctcttaaaaaaaaaaaaaaaaaaaaaacctaaaaattaaaatacttcatatatacaaaagaataagtatgaacacttactatttatttatttatttttgagacagagtctcctccctctgtcgccc

SEQ ID NO: 556891 - DNA, 201 bp, Homo sapiens
ccacacctggccatgtcacattttattttgctgtatgtttggaccatgactttctggtacaactttcccccaacagctcttaaaaaaaaaaaaaaaaaaaaaacctaaaaattaaaatacttcatatatacaaaagaataagtatgaacacttactatttatttatttatttttgagacagagtctcctccctctgtcgcc

SEQ ID NO: 556892 - DNA, 201 bp, Homo sapiens
ggccaaggtgggcggattgcctgaggtcaggagtttgagaccagtctggccaacatggtgaaacccgtgtctactaaaaatacaaaaaaattagctgggtrtggtgatgtgcatctgtaatcccagccacttgggaggctgaggcaggggaattgcttgaaccagggaggtggaggttgcagcgagccgagattgtggcac

SEQ ID NO: 556893 - DNA, 201 bp, Homo sapiens
ctcagtagaagtagtattctgtctacaagctgtttcaggggaaagaagtgtagtagttgcttctctctgcttctgttttgcattattccattcagtgctgkttacagtataagggcaggatcgtattggctctaattttcctaaagcaaatgggaacctaggggaaaccctccaaagatggggtttggagtcaagtatgtt

SEQ ID NO: 556894 - DNA, 201 bp, Homo sapiens
ccagctagtgtgactgtgcttttttatatcagattttctttttgtaccttgggtttttgttgtttcccttcataggcacagataaatcagagtcaaatatycttgtcattttctagtggaatttattaaccttgacattgaagtgaggtctaacctgtagtacaatgtggcctcccaattttcagtggtatctaatagatg

SEQ ID NO: 556895 - DNA, 201 bp, Homo sapiens
tcttcaattctaatttcagttggttttgttttgttttgttttgttgtgacttggggttccggctgtgttacccagacagactgtagtggccattcacaggygagatcccactacagatcagaatggaattttgacccactctgtttctgacttgggctgttcacccctccctccttaggcaacccaggagtggttcctcac

SEQ ID NO: 556896 - DNA, 201 bp, Homo sapiens
ggtgatctacccgccttggcctcccagagtgctgggattacaggcgtgagccaccacacccagcccatatttgggtttataaagggaaaaatggaaaagayagccatagtgcctcacagcccatctacccaaagttggattgaatttgcgtgttctattggaagtgacttaaaggtggccaaaaaatgataggatgattta

SEQ ID NO: 556897 - DNA, 201 bp, Homo sapiens
ttaaggaggtcctggccttaagaatgagttccccctggccaggtgcagtgcctcacgcctgtaatcccagcactttgggaggccgaggtgggtggatcacraggtcaggagttcaagaccagcctggccaagatggtgaaaccccatctctactaaaaatacaaaaaattagccgggcgcagtggcaggcgcctgtagtcc

SEQ ID NO: 556898 - DNA, 201 bp, Homo sapiens
ttaataatggttctagctatataccgcccttaggataattaagaagatgggcactcagataattttctgaagggcttaattctatacaattttttttttttgtagatatagagcttctctatggtctcaaacctggtctcaagtgatcctctctccttggcctcccttaatgatgagattacaaacgtgaaccaccacacc

SEQ ID NO: 556899 - DNA, 201 bp, Homo sapiens
cttgaacctgggaggcggaggttgcagtgagccaagattgcaccactgcactccagtctgggcaacagagggagactccatctcaaaaaaaaaaaaaaaaraaagaaagaaaaagaaaaaagaaattcattgaaaaataattcttttaagttaaatatatgtttttcacttagccatttattttaaagaaatagttttatg

SEQ ID NO: 556900 - DNA, 201 bp, Homo sapiens
actgctttacattccagagcgttcccttttctctgcatccttgccagcatttgctattgatcttttgcccattttttaatttttaatttttttttttttttgctattatttgggtttcttatatattgtggttactaatctcttgttggatgggtagtttgcaaatatttcctcccattctgtaggttgtctctttacttg

SEQ ID NO: 556901 - DNA, 201 bp, Homo sapiens
ttacttaagagatctttgcccagatcaatgtcctgcagcatttccctaatgtttgcttgtagtagttttatagttcacatcttacatttaagtctttaatycattttgatttgatttttgtatattatgagagataaaagaaaggattgtctcttaaagatgaactgaaaggtgatagaagattttacttgacctttgagg

SEQ ID NO: 556902 - DNA, 201 bp, Homo sapiens
gagccacctcatccagcttggataacttttttaaaaattatttttatttttttggagacacagtcttgctgtttcacccaggctggagtgcagtggcacartcatggctcactacaacctcagcctcgacttcccgggctcaagtgatcctcccacctcagcctcctgagtggatagcttattttttaaataaaattttta

SEQ ID NO: 556903 - DNA, 201 bp, Homo sapiens
tttcaccatgttagctaggatggtctcaatctcctgacctcgtgatccgcccgcctcagcctcccaaagtgctgggattacaggcgtgagccaccgcgccyggcctcgcaggtctttatgacagggacagatctctttgaaattcaaaaagtaattgagcagattctaagctgtgtttcaacctttttttgttttgttttg

SEQ ID NO: 556904 - DNA, 201 bp, Homo sapiens
tgaatccgggaggcggtgattacagtgagctgagatcacaccactgcattcctgcctgggtgacagaaggagattccatctcaaaaaaaaaaaaaaaaaaaaagaaaagaaaagaaaaaacacacataccccacacaaatccagggtgggccattttgtcttagtttttagtatgcctcactatttagatttatctggttc

SEQ ID NO: 556905 - DNA, 201 bp, Homo sapiens
ttgaatccgggaggcggtgattacagtgagctgagatcacaccactgcattcctgcctgggtgacagaaggagattccatctcaaaaaaaaaaaaaaaaaraaagaaaagaaaagaaaaaacacacataccccacacaaatccagggtgggccattttgtcttagtttttagtatgcctcactatttagatttatctggtt

SEQ ID NO: 556906 - DNA, 201 bp, Homo sapiens
tcctctccctcctctcaacctcttacctccagttagtcccagtgtctgtcttctttgtgttcatgtgttctcatcatttaactcccacttataaataagarcatgtggtatttggttttctgatcctgtgttaatttgctaaggataatggcctccagcgccatccatgttcctgcagaggacatgatttcattctttttt

SEQ ID NO: 556907 - DNA, 201 bp, Homo sapiens
tcactcaaaccatctggagatcatacagttaaccctttaatacatatcctctatgaacatatttatggatatatatacagattttttaagcccaaatgaarttatactttacttattcttctgcatcttgctttttcagtcatctgcttaccttttcaagttagtaagttttcatatcatctgataaacccagaccatatt

SEQ ID NO: 556908 - DNA, 201 bp, Homo sapiens
agctcgagaccatcctggccaacatggtgaaaccccgtctctactaaaaacacaaaaattagctgggcgtggtggcatgcagctgtagtcccagctactcrggaggccaaggcaggagaattgcttgaacccgggaggcagaggttgcagtgggccgagatggcaccactgcactccagcctgagcgacagagtgagactc

SEQ ID NO: 556909 - DNA, 201 bp, Homo sapiens
ttaaaaatgaaaagatgaaattacttatttacagatcttttgtctacctagaaaatccaagaaaatgcactaagaatttattaaaattaatgtaatcaaaktagctgcatacaataaatatttcagaattaatagattctcattatatcagtgttaacagaaaaaccaaattttataaaatgttttaaagaggtttgtcct

SEQ ID NO: 556910 - DNA, 201 bp, Homo sapiens
agatggcttttccactagaggggatagtgttgactatatgtacatgcattcttttcttggattatcttaagcctatataattaattaatactacttgcggyatatatagcaccgacctagatttgggtagagacaacatattcaaactaaacacggctgctttttaagttggaagaataaaaagggagaccaaagaagcat

SEQ ID NO: 556911 - DNA, 201 bp, Homo sapiens
cctgtgttgggctatttgatgaaaggcctgtgtgaaaagcccctggcttctgctgcagccaaagccattcataacatttgctctgtctgccgagatcacakggctcagcactttaatggactcctggagattgcccgctccctcgattccttcctgttgtctccagaagctgctgtgggcttgctaaaaggtactcacttg

SEQ ID NO: 556912 - DNA, 201 bp, Homo sapiens
taccttggcagtatccttgtggatgaatatggcatggaagaaggctgtcggcagggactgctagacatgctccaggtatcttttccatgaggagtgtagaygcatcaggcctagagggtctgaaggcctagcagcgtattctttaccatgtctttaattctgttgcttctttatgttttcccccaggcatgttgatttcct

SEQ ID NO: 556913 - DNA, 201 bp, Homo sapiens
acccagatcccagcggaaaggagcgcgcctctttttggcttggggagctgcagcgttcggtgaggggcccagagaggcagttctgtgccgcacggccgggrcggggtggaacctaggctccgggggagaacctgagcccggcagttgacctcgtgaggtcctccttggggaggagctgctgtcgtggggtggggctgcgaa

SEQ ID NO: 556914 - DNA, 201 bp, Homo sapiens
ctccttcattttctttctaaagacaaaaaacttctggactttgtgaatccagctgtcattttacacacacctgcatacacacacacacagccacgcgcgcrcacacacacacactttcctattaaagagaaattactaaaggggaaagagtgcttggtctttgggaagttgagactagaatttatctgatgttcctgcttt

SEQ ID NO: 556915 - DNA, 201 bp, Homo sapiens
tcagggagtgctgacattggagactgcctatcatatggccgtggcacgtgaagatttagacaagtgagtaattgtttaagtctggagccctgggtttaccyacagtctggtcattcttttaagtcactttttattattcgtctgtcatttgtgattctcagtgattctgtaaagtacagatagtgcttcctaaagatgctc

SEQ ID NO: 556916 - DNA, 201 bp, Homo sapiens
ctttcattttagaaatatggtttcattggctttagaattctttcctttttttcttcccattttttagctctacctctccatgtcttctggcatcctcattsttgacaagaagtctgctctagctttttacttttgttcctctgtatttaatgtgtcctttttctctgcttcccttcagtatttctctttatctctggtttt

SEQ ID NO: 556917 - DNA, 201 bp, Homo sapiens
tagaaaatgtatttatgtatacccaagtgtattttgtgaatctgggagcttgctaggagatttatgattacttttcttttacaatttttttttttttttttggaggatgggagttgttttatcactgctttggtgaagatattagctaagtttgatttcatcttggtttctgtgtttcaggccatcttgcaaaagaagtta

SEQ ID NO: 556918 - DNA, 201 bp, Homo sapiens
ttaggagtctactgcttcttacacagattttgacccttttatttatttaaacttttttctttttttgttttaaggctgcattactagccgattccccccccacccttttttttttttttttttttgagacagagtctcgctgtctcccaggctggagtgcagtggcgccatctcagctcactgcaagctccgcctcccggg

SEQ ID NO: 556919 - DNA, 201 bp, Homo sapiens
atctttatgtagttttactaatatttaagttttatttttaaaacaaaattttgtggaaccttttttttcctgttggtaatcaaatacctctttttttttttaacattttgttttctgggtatccacaataagtcaccctcaaatctcagtactgtaaatatcctcattgttcagactggtgatttgttttcttttttggct

SEQ ID NO: 556920 - DNA, 201 bp, Homo sapiens
acgccaccacacccagctaatttttgtattttttagtagaaacggggtttcgccatgttggccaggctggtctctaactccgacctcaggtgatccgcccrcctcggcctcccaaagtgctgggattatagatgtgagccatcgccccccgctgcaactttgactttgaatattaaacctaaaaaactggcacccaagtcc

SEQ ID NO: 556921 - DNA, 201 bp, Homo sapiens
ttttaaaaagatggctgtggcctgcccggcgtggtgggaggggagctggtttcctggtgaactttctaaaaggaaaaataattttaagtaaagaaaaaagraaaaaaaggaagactaaacagaaaccagaactgaaacattcacctggtagcaaatgacacatgcacgcacacacacatacacgcacaagcgccagtgcgc

SEQ ID NO: 556922 - DNA, 201 bp, Homo sapiens
taaatatttggcaagtctgaatgctgtggcatttctgaaaaagcatttcttttaaaatcactgttttgttttaggcactgtgcatccccacctttcagctyctagaacagcagaatggtctccagaatcaccctgacactgtagatgacctgttccggctagccaccaggtaaatccttctgaagagcccatttcttaatt

SEQ ID NO: 556923 - DNA, 201 bp, Homo sapiens
cgtgaggtcctccttggggaggagctgctgtcgtggggtggggctgcgaagctacatctttgccgcttttgggaaactagtcgcacctgatcggtcgcgawctggccctttccccacccggcagaatctgatttgtaggtcttatactcttcgattgtggcatcaatctaatcttgtttaagttctccctttgccgttgct

SEQ ID NO: 556924 - DNA, 201 bp, Homo sapiens
atgttgttgcacaaccaatctcaagaactttttcatcttgtaaaactaaaactatacccattaagcaacaattctccattctcccctctccccatctcctrgcaattaacttcgtacttaatgtttgagtctgactactctagatacctcatataagtgagatcatacagatttgtctttttgtgattagcttacctcact

SEQ ID NO: 556925 - DNA, 201 bp, Homo sapiens
ccaggaactatctttaaacatctcttcctatatagctcgtaccaattcttttcatagcctttcgggaagtctgaagtttaggaaattgtgtatctctgtcwtttagcaaagttagacatgctcttccagttctaaagaggcactgttttctcttgttaagtgatagggttttgtggtgggtagtctattgaacctgagcat

SEQ ID NO: 556926 - DNA, 201 bp, Homo sapiens
agcgcggattttaaaaagatggctgtggcctgcccggcgtggtgggaggggagctggtttcctggtgaactttctaaaaggaaaaataattttaagtaaaraaaaaagaaaaaaaaggaagactaaacagaaaccagaactgaaacattcacctggtagcaaatgacacatgcacgcacacacacatacacgcacaagcgc

SEQ ID NO: 556927 - DNA, 201 bp, Homo sapiens
actcatgcgagttttccccttgctttggagtggcaacataatatgaagaaaaaacagtaattctgctttcagaaaatctttggagttctcattttgtttcrtattaatcctctaaccttgttatttctctggcttttagatttttatttataagatgggtatcactgctgctttgattattccatataaaactgtatgtgc

SEQ ID NO: 556928 - DNA, 201 bp, Homo sapiens
gaggaaacttatgagagccgtagcaaccaagtgttgttgtagcagcctacatttattgaatactattttgttcactgctctattttcataagcactctgtrtgtggacgattttaatcctctaaacagtgttatgaagtagataatattaatagatgaggaaactgagacaaagattggtaacttgttcaagggcacagtg

SEQ ID NO: 556929 - DNA, 201 bp, Homo sapiens
agttatgtttaagaggaaaacagtcttatatgttgatacatgatttacatattaaaatccaaataaccattggtatctttttccttgttttaaaaatatamaattatgtatttcaataatggtcattgaatcctagacatttccatgatataattatgtgtgcatcacaagtttaggaaaaaacagaacaggaagaattaa

SEQ ID NO: 556930 - DNA, 201 bp, Homo sapiens
tctcctgttgactctaaggcagccacccacacattctggaatcccacacattgtagaataagtctttgtcaagccctctttccctcagtgggactaatatwtgacagataaaataatatggtaagtctgaaatcaaggtcatagatatcctttcctaatttaggataaatcttggggcaaggaaaagagacctaagtaaag

SEQ ID NO: 556931 - DNA, 201 bp, Homo sapiens
aaaatacttcatatatacaaaagaataagtatgaacacttactatttatttatttatttttgagacagagtctcctccctctgtcgcccaggctggagtgyagtggcacaatctcggctcacggcaaccttcgccctctgggttcaaatgattctcctgcctcagcctcctgagtagctgggactacaggtgtgtgccacc

SEQ ID NO: 556932 - DNA, 201 bp, Homo sapiens
tttgataattcattatctagataatggttactttgtattgtctgtttctttctagttgttgtcacttggttttgctttttttttccccccgacgtggtctygctctgtcatctaggctggagtgcaatggtgtgatcaaggctcactgcggccttgacttcctggctcaaataaatggacctcccaccacagcctccaaag

SEQ ID NO: 556933 - DNA, 201 bp, Homo sapiens
catctaggctggagtgcaatggtgtgatcaaggctcactgcggccttgacttcctggctcaaataaatggacctcccaccacagcctccaaagtagctggyattacaagcatgtaccaccacatctggctaatttctttttttctttcttttttgtgtagagacgaggtctcactttgttgcccaggttggtcttgagctc

SEQ ID NO: 556934 - DNA, 201 bp, Homo sapiens
taagaatgcagcaatgttccttccttgctacgaggtaccaaattagaagtatcagttttaatactcctaataggatatagttatgtttaagaggaaaacartcttatatgttgatacatgatttacatattaaaatccaaataaccattggtatctttttccttgttttaaaaatataaaattatgtatttcaataatggt

SEQ ID NO: 556935 - DNA, 201 bp, Homo sapiens
ctcataaggttacaatcatcatcattccatatcacttaacattagtttaatttcaggcagttttcatattgctgtattatattctaatgagctctgaaataccactttggaagctttgtcacagcaatactaaactaacctaatttttttttttttggtaactcagtcattttttgtatatttgggtgtaatatgatctaa

SEQ ID NO: 556936 - DNA, 201 bp, Homo sapiens
ggcgtgatcatggctcaccgcaacctctgcatcctgggctcaagcagtactcccacctcagtgttcctgcccacaccccccagtagctgggactacagacrtgccatcatgcccagctatttcaccttgttgcccagactggtcctgaactcctagggctcaagcagtcttcctgcctcagtctcccaaagtgttgggatt

SEQ ID NO: 556937 - DNA, 201 bp, Homo sapiens
cagagagggtgaactggtttagtttcatttcagcaagtccaagcctgcttttcacatggtactggtaattaattccctagcttttttttttttttttttttgagacggagtctcgctctgtcgcccaggccggactgcggactgcagtggcgcaatctcggctcactgcaagctccacttcccgggttcacgccattctcc

SEQ ID NO: 556938 - DNA, 201 bp, Homo sapiens
gccttaaagagaagaagccaatctatctctgaatttcttcctggagacagcttcgtaagttggtactttttgaaggacgaagcattgaactaattgttttktccctcaacagatggtgaatgtgtaccacgtacatcagcattcctgcttcctgtaccttggcagtatccttgtggatgaatatggcatggaagaaggctg

SEQ ID NO: 556939 - DNA, 201 bp, Homo sapiens
tagaatgtatgtttgatttaatttgcagaatttcatcttttcaaagagattagttttagaaacaggtttttttcagaatttggtctttcagtttgagtcartagttagaatgtacaagcaaatccttccacttgtacacatcatgtcttattaaaattgaaatatcattcaggaagtctaaaggccaagtgattatgtaat

SEQ ID NO: 556940 - DNA, 201 bp, Homo sapiens
ttagtagagacggggtttcaccatgttggttaggctggtctcaaactcctgaccttgtgatccacccacctcagcctctcaaagtgctgggattacagccrtgagccaccacacccggcccctgccattcttccttctataaatacttggatatttactctgtgcctcttgtggctttagatagtgacagatgtctcagaa

SEQ ID NO: 556941 - DNA, 201 bp, Homo sapiens
ctgaaacaacttgggtaagtctgtaacctctctctacttcagttttcccattgagaaagtagagacaataatagcagctacctataaagttgtatttgggkattgtgttagtccagtctcatgctgctataaagaaatacttgaggctgggctcagtggctcatgcctgtaatcccagcaccttgggaggccaaggtgggc

SEQ ID NO: 556942 - DNA, 201 bp, Homo sapiens
atctttgtagttgagattagttaaacatcgtatatgcaaaatggatttgggtttttgagattagtagaataagtactaatgtctttttatatacttgtgcrtttcttctttaagctttgaaagtagcagtgcctagtaatatagtcttggtagataggagttagggagtgattagaataagattacattttagaacaagaa

SEQ ID NO: 556943 - DNA, 201 bp, Homo sapiens
ttccttcaatgaagatatattagtatggaagctgcatgtattgtgaatgtatgccgatgcgctattactcagaagatagtaccatgatgctagattgatgmcactgtgaattaaagaaaagaaagacatttttcaaggagacatttggcatgtcattggtgtgtatttctgtgtcatttttgcatcagaagctaagcctta

SEQ ID NO: 556944 - DNA, 201 bp, Homo sapiens
gtttaaccattatgagatggaaagtgtgttttcatctgcattgaatccttggctgtaggcactggtatctgagttagttgagccagggagagggctacagsaaggcaagcatattaagaattgcttcctggctgggcgcggtggctcatgcctgtaatcccagcactttgtgaggccgaggcgggcggatcacaaggtcag

SEQ ID NO: 556945 - DNA, 201 bp, Homo sapiens
acttgactgttacacatttaaagtacatgttcagaaagaggctataattgaaagaaagaaagaggctctaattgttttcctattacatttatccatcactrtcttcaaaggattggttccaggaccacccactacccctgcccctctgtgcacagtttccaagagatgcagatgcccaagtcccttatataaaatggtgca

SEQ ID NO: 556946 - DNA, 201 bp, Homo sapiens
gtctgaaatcaaggtcatagatatcctttcctaatttaggataaatcttggggcaaggaaaagagacctaagtaaagcagtgctgtgggggaaaaaaaaaacctgttatctttgtcctgtgatatgggaaaataaggtgcaccaccaacctgacctacttgatcttccattgctaaacaagttttgcagctcttcctatag

SEQ ID NO: 556947 - DNA, 201 bp, Homo sapiens
tttaatcttctttaattttttgaagaaccatcatactgttttccatagcagctgcaccattttacattcccactagcagtgcacaaagttccaatttctcyacatcctcaccaacacttgttattttctgggtttttgagagtagccatcttagcatttcacaccaagtgtgaagtgatatctcattgccgttttcatttg

SEQ ID NO: 556948 - DNA, 201 bp, Homo sapiens
gcttccttttaaaactcttacccctctttcctatacagactttttgtcgatggttagaaaattccttaaaaggtttgccaaaggaaacaaccgtgggagcygtcacagtgacacacaaacaacttacagacttccacaagcaagtcactaggtgagtgatactgggggttcttaaggaggtgtgggatgtgggaagaaaca

SEQ ID NO: 556949 - DNA, 201 bp, Homo sapiens
ggacaacaattaaactgaaaataagaacccagaggaagtctgtagaatttttattttagaaaggaaggaagtaaagggagtagacaatttttgtgcatagraaaggcataaagagaattcttagatatacttatataaaaaatatataagtaaattaaacagcaacaagagcaaggttttttaacacaaagaacaggcaga

SEQ ID NO: 556950 - DNA, 201 bp, Homo sapiens
ctttttggcttggggagctgcagcgttcggtgaggggcccagagaggcagttctgtgccgcacggccggggcggggtggaacctaggctccgggggagaayctgagcccggcagttgacctcgtgaggtcctccttggggaggagctgctgtcgtggggtggggctgcgaagctacatctttgccgcttttgggaaactag

SEQ ID NO: 556951 - DNA, 201 bp, Homo sapiens
ctcaacagatggtgaatgtgtaccacgtacatcagcattcctgcttcctgtaccttggcagtatccttgtggatgaatatggcatggaagaaggctgtcgkcagggactgctagacatgctccaggtatcttttccatgaggagtgtagacgcatcaggcctagagggtctgaaggcctagcagcgtattctttaccatgt

SEQ ID NO: 556952 - DNA, 201 bp, Homo sapiens
accttaattgtattcacttctgtgtcttctgtgaatgttccatcttatttcttcaattttagtggctgaatgagataatagatatgcaagtgcctagcacrctgcctggcatatagtagctatgtttatttaacattttacaagtcagttgcagtttatggatgattcggttatggtttactctgtatgcttgcactgatt

SEQ ID NO: 556953 - DNA, 201 bp, Homo sapiens
cctttttatgtctacacctcctttcttccatactgagaatccaggttgtgagggacacagaaggtgacagagtatcttataattactcagtagctctgtcycacattaacctagtcagtagcctcagactaacaatactaacactactactatcagtatatacaccaaaaacaagcatagttttgcatgtgctctcccctt

SEQ ID NO: 556954 - DNA, 201 bp, Homo sapiens
gaacccgggaggtggagcttgcagtgagccgagattgcaccactgcactccagcctgggcgacagagcgaggctccgtctcaaaaaaaaaaaaaaaaaaaagattgttttggccacttggggacccttgaaattccatatgaattttagggtagatttttctgtacaagaggttgttgggattttgatggggattgtattg

SEQ ID NO: 556955 - DNA, 201 bp, Homo sapiens
acaaatatctctttcagcccctgctttcaattcttttggatacccagaggtagaattgctggatcatatggtgattctatttaatcttctttaattttttkaagaaccatcatactgttttccatagcagctgcaccattttacattcccactagcagtgcacaaagttccaatttctccacatcctcaccaacacttgtt

SEQ ID NO: 556956 - DNA, 201 bp, Homo sapiens
gctatgtttatttaacattttacaagtcagttgcagtttatggatgattcggttatggtttactctgtatgcttgcactgattgctgttccacttgtacasctggaatagaagatcatagataagcattaaagcctctaggatacttatagggaatttggacctagccaggaacaataggcaagtgtttctgctttagtaa

SEQ ID NO: 556957 - DNA, 201 bp, Homo sapiens
tttttatgtctacacctcctttcttccatactgagaatccaggttgtgagggacacagaaggtgacagagtatcttataattactcagtagctctgtctcmcattaacctagtcagtagcctcagactaacaatactaacactactactatcagtatatacaccaaaaacaagcatagttttgcatgtgctctcccctttc

SEQ ID NO: 556958 - DNA, 201 bp, Homo sapiens
gattgtgccactgcactccagcctgggtgacagagtgagactctgtctccaaaaaaagaaagaaaataattgaaggatgtgaaatatttacttgagccaasatagtttttctgctattttgtcgggaactaataattgaaatgtagggctactgagaccaatatgaagtatattctcatatttatagatatattaaaacag

SEQ ID NO: 556959 - DNA, 201 bp, Homo sapiens
ggcatagaagtgcccttaaagaggaggcttttcttaagtcttcaagatgacaaatgcaaagagaagggaaatggcaatccattacttgagaactgagtcaraggtctgactttattagtagctttgacctttggcatagtataatttatatgtctgtgaagttctgtggtattgccaaataaaagtaaatattgatatatt

SEQ ID NO: 556960 - DNA, 201 bp, Homo sapiens
tcatacttcttgcttccctattcctgctacctccccagcaacaggataagacctcgtctaacctacatgaagctgcttcggactgtgtatgctcagctctstatgccattgagaatgtggagactaacttgccattagccatgcaactttttcagggagtgctgacattggagactgcctatcatatggccgtggcacgtg

SEQ ID NO: 556961 - DNA, 201 bp, Homo sapiens
tgttgagaaattacagtcttgtttttaattaatgtgatttcatctgttttggaattttttaaaaaaattatatttgggtttctgcattgtgtccatttctrttttcttacctggttggctgggctgttgtaggcccctcaaggaactcgttagaaagcaagcctttccaatgaaccccttgtctagcttgacttattctct

SEQ ID NO: 556962 - DNA, 201 bp, Homo sapiens
cttacctggttggctgggctgttgtaggcccctcaaggaactcgttagaaagcaagcctttccaatgaaccccttgtctagcttgacttattctctagagygttacagctaaaaaacaccaaattctaactatacctccacaagtcttaacacccccaatttttctccaaatgatggatgagaatgacaaagggattgaaa

SEQ ID NO: 556963 - DNA, 201 bp, Homo sapiens
tttagtagagacggggtttcaccttgttagccaggatggtctcgatctcctgacctcatgatccatccgcctcggcctcccaaagtgctgggattacaggygtgagccaccgcgcctggccaattccctagcttttttagttggtcaacttgaagaaagctgggacgtttcagtctaaaataacattcttgctttccaaat

SEQ ID NO: 556964 - DNA, 201 bp, Homo sapiens
ggcaggagttcaaaaccatcctgagcaagatggcaaggccctgtttctactaaaaaaaaaaaaaaaaaaaaaaattagctgagcttggtggtgtgtacctrtagtcccagctacttgggaggctgaggcaggaggatcacttgagctcaggagtttgaggcagcagtgaactgtgttcattccactgcactctagctgggg

SEQ ID NO: 556965 - DNA, 201 bp, Homo sapiens
cagttttatactagattttatactagttcagtttaatatgcaacattggggtttttgttctgttttattttctaaacataaacacagaaacacaatacaartgtataacttagtgaattactatatgtggatgtccttttagccaccacccaagtcaagaaacatcttcatttgtctgaagatgttttctgatttcccttc

SEQ ID NO: 556966 - DNA, 201 bp, Homo sapiens
gcccagctggacattttcatcataccagaaagagacctgtaccccttggcctgccacctcccacctcattgctaggcagctactaatctactttctgtctstagagttttgcctattctggatatttcatataaatggaatcatatagttcatgatcctttgtgactgtcttctttcagttagtatgatgttttcaaggtt

SEQ ID NO: 556967 - DNA, 201 bp, Homo sapiens
ccctgtttctactaaaaaaaaaaaaaaaaaaaaaaattagctgagcttggtggtgtgtacctgtagtcccagctacttgggaggctgaggcaggaggatcrcttgagctcaggagtttgaggcagcagtgaactgtgttcattccactgcactctagctggggcaacagaatgaaactccgtctctaaaaaataaataaaa

SEQ ID NO: 556968 - DNA, 201 bp, Homo sapiens
tgatgtgtctgtaggcactttactggcattcagaagattaaggagcagtatgcttttcctgaaacaatatctttcatttctatcttttcctcttttttgargatttgaaaatctttcataacaaataccaagtacttttatcttaatggttgtttagaaagaagccctttagcaatgctgtgtgtcatcacagcctgttat

SEQ ID NO: 556969 - DNA, 201 bp, Homo sapiens
caggaagaagctgaaattttggatatacaaacacagaccccattgaatgatcaggcaacaaaggctaagtcaacccaggatctaagtgaaggcatctcacrgaaagatggtgatgaggtctgtgaatcaaatgtgagcaatagcataacttctggagagaaagtgatttcagtagaacttggattagataatgggcattct

SEQ ID NO: 556970 - DNA, 201 bp, Homo sapiens
aatgatcaggcaacaaaggctaagtcaacccaggatctaagtgaaggcatctcacggaaagatggtgatgaggtctgtgaatcaaatgtgagcaatagcayaacttctggagagaaagtgatttcagtagaacttggattagataatgggcattctgctattcaaacgggaactctaatccttgaagaaattgaaacgatc

SEQ ID NO: 556971 - DNA, 201 bp, Homo sapiens
ttacaagccatagagaaactgggcatttctatactagagaaaccacctaaaacaactgtatggagtaagatgaaaggtatgaatatgcctggaagaaattktacctagtgtgacatttttgctcatctttttgtcacaaaaggctgctaaggaagagagaatacagttttctagagaataagagtgcagtgtaaaaatgga

SEQ ID NO: 556972 - DNA, 201 bp, Homo sapiens
cagtaacagtaccctagaaagtgcaccaaatggaaaagactatgaaagtacagagattgtagctgaagaaactaagccaaaagatactgaattgagccaaraatcagattttaaagaaaatgggatcactgaagagaaatccaaatcagaagaaagcaaaagaatggagccaattgctattattattacagacactgaaat

SEQ ID NO: 556973 - DNA, 201 bp, Homo sapiens
ctgaagctgctgatgtggcaaggaagtgtccacaagaagcaggagcttctgatcagccagagcccacacggggggcctgggcctcactcaaacgtcttgtmacacgcaggaaaaggtcagagtcttcaaagcagcaaaagccattggagggtgaaatgcaacctgcaataaatgctgaggatgctgatctttctaagaaaa

SEQ ID NO: 556974 - DNA, 201 bp, Homo sapiens
ggagcttctgatcagccagagcccacacggggggcctgggcctcactcaaacgtcttgtaacacgcaggaaaaggtcagagtcttcaaagcagcaaaagcyattggagggtgaaatgcaacctgcaataaatgctgaggatgctgatctttctaagaaaaaggcaaaatctagacttaagattccctgcataaaattccca

SEQ ID NO: 556975 - DNA, 201 bp, Homo sapiens
caggcaacaaaggctaagtcaacccaggatctaagtgaaggcatctcacggaaagatggtgatgaggtctgtgaatcaaatgtgagcaatagcataacttytggagagaaagtgatttcagtagaacttggattagataatgggcattctgctattcaaacgggaactctaatccttgaagaaattgaaacgatcaaggaa

SEQ ID NO: 556976 - DNA, 201 bp, Homo sapiens
gaaagatggtgatgaggtctgtgaatcaaatgtgagcaatagcataacttctggagagaaagtgatttcagtagaacttggattagataatgggcattctsctattcaaacgggaactctaatccttgaagaaattgaaacgatcaaggaaaaacaagatgttcaaccccagcaagcaagcccacttgaaacttcagaaac

SEQ ID NO: 556977 - DNA, 201 bp, Homo sapiens
tatctactccaaaagaacgtgtgtcaagacgctttgggcggagttttacctgtgatagctgtggatttggctttagctgtgaaaaattattagatgagcaygtgctaacctgtactaacagacatttataccaaaacacaagatcttaccatagaatagtagatattagagatggaaaagacagtaacatcaaagctgaat

SEQ ID NO: 556978 - DNA, 201 bp, Homo sapiens
cggaggttgcagtgagccgaaattgccccattgcactccagcctggatgacagagccagaccctgtctcaaaaaaaagaaaagaaaaaagaagtcccaaasagagtgagctagacattgaaaaggttctaagcaaaggaacagcatgtgtgaaatggcaaggcttttggtgtgttaggttatttgggatcgggggaatctt

SEQ ID NO: 556979 - DNA, 201 bp, Homo sapiens
tttggcagcattaataaagaggtcaaaaaaatgaaaaaagagcaaactcctcttggaatttgagtgaaattataatttaatgaaagtgaatgcctcataattttttttttttttttttgagatggagtcttgctctgtcgcccaggctggagtgcagtggcacagtcttggctcactgtaagctccgcctcccgagttccc

SEQ ID NO: 556980 - DNA, 201 bp, Homo sapiens
aacactttatacagtgcctggtataccaaaggtagtcagtaaatgtttgttgaatgaataaatgtgcattaaaatgctataagtgctcttatttaaatgtyttagtgttttatgttaataaaagaatatgtatttttactcagttgaattgtgactatagctatagatgtgcctatcatattgatcttctatgtagttgta

SEQ ID NO: 556981 - DNA, 201 bp, Homo sapiens
tttgtgtatttttttcatcttttttccccccaccttttgaataaggttgtggcgtggatttgttttatataattctaacataattatgtatcctgtgtttrtttatttggctctccatcttgaacatttttcccacttctgtagttgccatttagaaatatatatatatatatatatatatattttttttttttttttttt

SEQ ID NO: 556982 - DNA, 201 bp, Homo sapiens
ttaggtattaaatgtttatcatttttgttgtttcttaatagaattatttgtttttagtttttcttagctatgattaaaatttttaaatgtagactacaagyggttgttacccattcaatgactattaaactttagtttttcatcaataaggtgatgacttcactatttctatgtgtttttttttttttaaggttatcctgt

SEQ ID NO: 556983 - DNA, 201 bp, Homo sapiens
atttgttttatataattctaacataattatgtatcctgtgtttatttatttggctctccatcttgaacatttttcccacttctgtagttgccatttagaaatatatatatatatatatatatatatttttttttttttttttttttgagacagtcttgctctgtcagccaggctggagtacagtggcatgatctcgactca

SEQ ID NO: 556984 - DNA, 201 bp, Homo sapiens
tttgttttatataattctaacataattatgtatcctgtgtttatttatttggctctccatcttgaacatttttcccacttctgtagttgccatttagaaatatatatatatatatatatatatatttttttttttttttttttttgagacagtcttgctctgtcagccaggctggagtacagtggcatgatctcgactcac

SEQ ID NO: 556985 - DNA, 201 bp, Homo sapiens
agaaatgacgcacatgggttaaatggtatatggcaaactaacagtttgagtatggacaaaaattcaattagaagaaaggatcccagaggggctaataattwaaaaaaaaaaaaagtttgctagagcagtcaggacactaattaaaaggaaaagtagaggctgggcaccagcaccttgggaggccaaggtgggtggatcacc

SEQ ID NO: 556986 - DNA, 201 bp, Homo sapiens
attaccttatttctatactactatgttaaacctactactttaatgatctggctaccgtctgccaaatgtcacttttcaagtgagaacagaagaatgagatwgtgaagattctgtggacaatgtctatataatcatttaagtgttaaatataaactaaatgacaatagcagcttgtaaattaatgctaattctggctgggag

SEQ ID NO: 556987 - DNA, 201 bp, Homo sapiens
ttgttttatataattctaacataattatgtatcctgtgtttatttatttggctctccatcttgaacatttttcccacttctgtagttgccatttagaaatatatatatatatatatatatatatttttttttttttttttttttgagacagtcttgctctgtcagccaggctggagtacagtggcatgatctcgactcact

SEQ ID NO: 556988 - DNA, 201 bp, Homo sapiens
ctggagtttgaacctaggtttctgacttctacattcctgtactccacctatcaagaagtacaaagaagggccttttcagcctagaaacacatgtgataaarctcctatgagattgtgctccttgttcatctgtcatctgctgtgctggtaaggtggctagtaatagtgggtacccaattaacatgctgaataatgtgaaaa

SEQ ID NO: 556989 - DNA, 201 bp, Homo sapiens
gctgtggtcagagaattgcttgagcctgagaggtcaaggctgcagtgagccgtggttgtgtcactgcactccagcctgggcaacagagcgagaccctgtckcaaaaaataaaaacaaataaattcatcatatctttgactaataaacagaagaacccccttccccagttaccataggtgattgatttgattaagatttata

SEQ ID NO: 556990 - DNA, 201 bp, Homo sapiens
tgttttatataattctaacataattatgtatcctgtgtttatttatttggctctccatcttgaacatttttcccacttctgtagttgccatttagaaatatatatatatatatatatatatatttttttttttttttttttttgagacagtcttgctctgtcagccaggctggagtacagtggcatgatctcgactcactg

SEQ ID NO: 556991 - DNA, 201 bp, Homo sapiens
ataattttactcagaatcactagggcagattaggaggcttataagcctaggaatttgcaggaaaacccctcctcttcttttgtgcgtgtatgtgtgtgtgygtgtatgcttcattttcatttgcagagtggctgaagacagtaaaaagaatatgaactttaaaaaaattgttagatttatgtttcaatcagagatttgtca

SEQ ID NO: 556992 - DNA, 201 bp, Homo sapiens
aattatgtatcctgtgtttatttatttggctctccatcttgaacatttttcccacttctgtagttgccatttagaaatatatatatatatatatatatatatttttttttttttttttttttgagacagtcttgctctgtcagccaggctggagtacagtggcatgatctcgactcactgcaacctccctcagccaggctg

SEQ ID NO: 556993 - DNA, 201 bp, Homo sapiens
ttatgtatcctgtgtttatttatttggctctccatcttgaacatttttcccacttctgtagttgccatttagaaatatatatatatatatatatatatatwtttttttttttttttttttgagacagtcttgctctgtcagccaggctggagtacagtggcatgatctcgactcactgcaacctccctcagccaggctgga

SEQ ID NO: 556994 - DNA, 201 bp, Homo sapiens
gatagattaataagaacatcttatatttgaatggtacgagttacattcgggaaataattaaatttaaattctaggggctatgcttgtgtttctattctctrttctgttaacagtgtgttggcctagtgccaaagccaagaaattctgatctaagaattatgttgtatcttgtagagcagtcaacttgtaatattatttttc

SEQ ID NO: 556995 - DNA, 201 bp, Homo sapiens
acccactgaagggttcaaatacatgtgaattctactgctttaagagaaataaaacaaataagcctagggaaatattagagtctaaaaaaccctagagttamtctcttttgggaacataaggaggtatacagaactgcagacctctaaacataagtaggaaaaagaaaaataaaagaatattaccaataattaaaggtgcca

SEQ ID NO: 556996 - DNA, 201 bp, Homo sapiens
agaggcatctgcctcaccctaagatcagaaaaaacttcccaaagaggccaggcacaatgtctctcacctgtaatcccagcaccttgggaggcctaggcagrcggattgtttgatctcaggagtttgagaccagcctggccaacatggcgaaaccctgtctctacaaacaatacaaaagttagctgggcgtggtgccgcatg

SEQ ID NO: 556997 - DNA, 201 bp, Homo sapiens
gcaagagcaggaaaggtagggatggagtagatgggcagatttgagaaatatttaatgggaaaattggcaacacttaatggttgattatgagggagaagttmtaggtagctcccaagtagtctaggtgattggtacatagtggtggcagctgagacaaaatacagggaggggcatttttaagtgggttccagacaaaatctg

SEQ ID NO: 556998 - DNA, 201 bp, Homo sapiens
gctctggttcctgttgcggccggtaagtatttgccagttgtggggctatttgcgcaactttggcccaggccggagggcgacgggccgcgggcctggcggastgcggggccggaggggcgccgatccgtgcggggagccggagcgcggcggacgcgctgcgaggacccggtgacgggcggctgccaggccgcctgcttgttg

SEQ ID NO: 556999 - DNA, 201 bp, Homo sapiens
ctgggattacaggcgtgagccacggtgcccggcctcaaaaatttttaatgaaaaaattatcttcaagagataagctaaaagtctcacaggaatttagatcyctcctcccctgccgcatactcctctacctgtttttggtgtagtaatccttcttaaagcttttctgggctaggcacagtggtttatacctgtaatctcagc

SEQ ID NO: 557000 - DNA, 201 bp, Homo sapiens
ctttcattactcatatccttcaagagttgttttctttttttttttttcttttgagacagagtcttgctctgtcatccagactggagtgcagtggcgtgacrcaactcactacagcctctacctgtcgggctcaagtgatccacccactttagcctcccaagtaactgggactacaggtgatgccaccacacctggttaatt

SEQ ID NO: 557001 - DNA, 201 bp, Homo sapiens
gactttaatatttttgttttacataggtctctaattaacagaagatggcaaagcccagccacagcagctatgtccttcagcagctaaacaaccaaagagartggggttttctctgtgactgctgtattgcaattgatgacatttactttcaagcacacaaggcagttctagctgcctgtagctcctattttagaatgtttt

SEQ ID NO: 557002 - DNA, 201 bp, Homo sapiens
atgactttgggagctagaaagggggttcctcctcttaaagaaacaggaaactgggccgggcgcagtggctcacgcctgtaatcccaacactttgggaggcygaggcgggtggatcacccgaggtcaggagttcgagaccagcctggccaacatggcgaaaccccatctctactaaaagtacaaaaattagcctggcgtggt

SEQ ID NO: 557003 - DNA, 201 bp, Homo sapiens
ccagagataatcaccatgtacagttaattccttgtttaaaacgagagaaggcaacatttgatcacagctgtgtgtgcctcactctgcctggggatggcctrtggtgattcatggactcatgttctctgttcacattactcaggttggtaagaattgccaggtagaggaaaggggagtgttttgcattgggctgatttaaaa

SEQ ID NO: 557004 - DNA, 201 bp, Homo sapiens
acattctaactctatagaattattgcttctttgataattcaagaaaagacaaaggcactgatcaaacttgtttggtgccatttctatataatctaataaggttgttgttgttgttgttgttgttgttgttttgaaacggagtctcgctctgtcgcccaggctggagtgcagtggtgcgatctcggctcactgcaagctccg

SEQ ID NO: 557005 - DNA, 201 bp, Homo sapiens
actaaatgtcagacattcagtaatgactgagatactgccctgatgtcaaggagcttgcagtaaagcaggggagccaaataattgcaatatctgccttaagygtggtaacagagcatcacagttgggatgatgcattattggtaccatattgttgtatgtataggctgttttggcagcacagaagaggcatctgcctcaccc

SEQ ID NO: 557006 - DNA, 201 bp, Homo sapiens
cattctaactctatagaattattgcttctttgataattcaagaaaagacaaaggcactgatcaaacttgtttggtgccatttctatataatctaataaggttgttgttgttgttgttgttgttgttgttttgaaacggagtctcgctctgtcgcccaggctggagtgcagtggtgcgatctcggctcactgcaagctccgc

SEQ ID NO: 557007 - DNA, 201 bp, Homo sapiens
gatctaggaaaagtaaaaattcctcaaatgaatacagaatacttgtgctactgctgatgatcaacactttatacagtgcctggtataccaaaggtagtcartaaatgtttgttgaatgaataaatgtgcattaaaatgctataagtgctcttatttaaatgttttagtgttttatgttaataaaagaatatgtatttttac

SEQ ID NO: 557008 - DNA, 201 bp, Homo sapiens
ggtagaaaggattaccatcccttcttagagaattgaagcacaaattgactaagcaaccttctcaaggtcacacacttaataagtggcagagccagaatttraacccaggcagtctggttagtttgtgctttaacacctactttatgtagctgttctgattattaaaatacagtgtaaaaagtgcaaaataaagaggtaata

SEQ ID NO: 557009 - DNA, 201 bp, Homo sapiens
attctaactctatagaattattgcttctttgataattcaagaaaagacaaaggcactgatcaaacttgtttggtgccatttctatataatctaataaggttgttgttgttgttgttgttgttgttgttttgaaacggagtctcgctctgtcgcccaggctggagtgcagtggtgcgatctcggctcactgcaagctccgcc

SEQ ID NO: 557010 - DNA, 201 bp, Homo sapiens
tgacacagggtctacataattacatgtgaattaaaacattggcaaaactgacccaccaataaacacatctattgaatagaatgccttttaatgtgaattacttgcaatgtagtacccttttcataatgaaagggattttaattaactcctaattttaaaaatataaatttgtgattctgaacactaatagcattgctcttt

SEQ ID NO: 557011 - DNA, 201 bp, Homo sapiens
aaattttctaaacttgatcgtgtttgtcacttaagtgcgttgaaataaaacctcttatctttgggagcctctacaactggttattcctggaagtttcaagragaaacctagagaatgtaatagagattggaccctataccctgcaagatggtattctaggaaagaattttgccaatgtgacattatttttatagatggcag

SEQ ID NO: 557012 - DNA, 201 bp, Homo sapiens
attcaagaaaagacaaaggcactgatcaaacttgtttggtgccatttctatataatctaataaggttgttgttgttgttgttgttgttgttgttttgaaayggagtctcgctctgtcgcccaggctggagtgcagtggtgcgatctcggctcactgcaagctccgcctcccaggttcatgccagtctcccgcctcagcctc

SEQ ID NO: 557013 - DNA, 201 bp, Homo sapiens
gttgcccaggctggagtgcagtggctcaatctcagttcactgcaacctctgcctccaggttcaagcgattctcctgcctcagccccccaagtagctgggaytacaggcatccactatcatgcccggctgatttttgtatttttgtagagacagagtttcaccatgttggtcaggctggtcttgaactcctgacctcaggtg

SEQ ID NO: 557014 - DNA, 201 bp, Homo sapiens
tggtttcgatctcctgacctcgtgatccgcccgcctcggcctcccaaagtgctgggattacaggtgtgagccaccacacccagccctaataaggttttttwaaatttttatttttgggatagagtctcactctgtcacacaagctagagtacagtggcgtgatcatggctcaccacaacctcaaaatcctgggctcaagcc

SEQ ID NO: 557015 - DNA, 201 bp, Homo sapiens
aaaatttttaaatgtagactacaagtggttgttacccattcaatgactattaaactttagtttttcatcaataaggtgatgacttcactatttctatgtgtttttttttttttaaggttatcctgtgaaattttaaacccagaatcattggccatttctgtttaaattttaaaaattccttaagtaattatttgaaactat

SEQ ID NO: 557016 - DNA, 201 bp, Homo sapiens
tcataattttttttttttttttttgagatggagtcttgctctgtcgcccaggctggagtgcagtggcacagtcttggctcactgtaagctccgcctcccgrgttcccgccattctcccgcctcagcctcccaagtagctgggaatacaggtgcctgccaccacgcccggctaattttttgtatttttagtagagacagggt

SEQ ID NO: 557017 - DNA, 201 bp, Homo sapiens
ctattcagaaggtgtgaggtggaaggattgcttggagaatgagtacccatattaaagcaggaacagaatgctattgaggacattctgagctatgatggcaygccagcctgggtaacagagtaagaccctgtctcaaaaaaataataattaaaatttaagaaaaaagcttttctgaatgaggtgtaacaaggacagagtttc

SEQ ID NO: 557018 - DNA, 201 bp, Homo sapiens
ctttatgtcttagaggtggcaggatgggcatataggtagtaaaaggggcgtatgacccatatgtgatcgctgaggaatggataaaaagcaaatagaagtaygtaaacgtagatacccttaattactactacagagcttgaagagtgaacattttatttctctaaacagcttgttacatgttctttttaagttcagtcaaat

SEQ ID NO: 557019 - DNA, 201 bp, Homo sapiens
gcatatatccatatatatccatatgtgtatatgtgtaatgtatctgtgagagatatatatacatctccctatacatctgcctggaatagagcctggcatayagtgagacataacaaatgttagctattcatattattattgtattacagttgtcatttactctactttgataaccttcatctaccagtccagtaaagcaaa

SEQ ID NO: 557020 - DNA, 201 bp, Homo sapiens
tctatactactatgttaaacctactactttaatgatctggctaccgtctgccaaatgtcacttttcaagtgagaacagaagaatgagattgtgaagattcygtggacaatgtctatataatcatttaagtgttaaatataaactaaatgacaatagcagcttgtaaattaatgctaattctggctgggagcagtggctcag

SEQ ID NO: 557021 - DNA, 201 bp, Homo sapiens
  misc_feature (1)...(201): n = A,T,C or G
ttataaaatccatgctctttgaaaaattcagcctgtattgaagtacataaaatacaaaaatgaaagtcattttgactcccactccccagagataatcaccntgtacagttaattccttgtttaaaacgagagaaggcaacatttgatcacagctgtgtgtgcctcactctgcctggggatggcctgtggtgattcatggac

SEQ ID NO: 557022 - DNA, 201 bp, Homo sapiens
aagccaacaggtggtgtgcagagccaagttcaacggtaaatacaccacataatagagaggctgatgaagagtctttacaattaggtaattttcctgagccrctatttgatgtatgtaaaaaaagttccgtgtccaaattatctactccaaaagaacgtgtgtcaagacgctttgggcggagttttacctgtgatagctgtg

SEQ ID NO: 557023 - DNA, 201 bp, Homo sapiens
actttaatatttttgtttaggattttaagtatctacatttaggtattaaatgtttatcatttttgttgtttcttaatagaattatttgtttttagtttttyttagctatgattaaaatttttaaatgtagactacaagtggttgttacccattcaatgactattaaactttagtttttcatcaataaggtgatgacttcac

SEQ ID NO: 557024 - DNA, 201 bp, Homo sapiens
acaacccttcccctcaaggtattcatggtctattaaggaacagatatgcaaacaaaaccgtaatataatataatataatataagcaataacagacacacayactaagtccactggcatctcaaaaaggagtaatcaactacttctgagttagaggaaggaaaaagatacccaagtcaggtataaaagtatgaataggaatc

SEQ ID NO: 557025 - DNA, 201 bp, Homo sapiens
aattagtatataaagaatgctttaaaaacaaatgaagaggttaagcaaattatgaaaaataatcaagcacttgttttacaagaacagttgtaaaagggatyaaaaataaaaaaaccccctaaagttcaataatagttccaacctactcatgtcctgttatttcccccaagcaatttgtgatccatccacacaaccaaaatc

SEQ ID NO: 557026 - DNA, 201 bp, Homo sapiens
aaaagggattaaaaataaaaaaaccccctaaagttcaataatagttccaacctactcatgtcctgttatttcccccaagcaatttgtgatccatccacacwaccaaaatctactctttctcaaacatgccacacaattttaaatctctgctttggcataaactgctctttttgctagaattctaaaccactttccctccta

SEQ ID NO: 557027 - DNA, 201 bp, Homo sapiens
tggcataaactgctctttttgctagaattctaaaccactttccctcctaacaaactttctgattttctcctaagatactcccctgccctaatactgctggraaatgtgttcatcaactcatcttagcatcactcttcttagcaaactaaattttttttctcagtcatgcttccatatgacatgcatctctctaacatagag

SEQ ID NO: 557028 - DNA, 201 bp, Homo sapiens
ttgtatgttaaaacagtccaaattgtgaacttctcagaagcaggaactttcttattcatctgtgtattctgagagcctgggatattacaaaacgcttagtragtgtttggtgagttaaaataaaaggtggataaacattccaaaataacacaacacagagcagccagggtcaattttgactatatctggaatgtcgctact

SEQ ID NO: 557029 - DNA, 201 bp, Homo sapiens
tgcattcgtgcgtgcgcagacagacagacacacacacatggataataggaaaactaagtagtagatactttataaaatcttgtggctacagaaaatagcgkaataaataacctcagaagataaaaattctacaaacttttctaagaaaatacaaaagggcaaatgttgaatattaactgagttctgaaaagttttctcact

SEQ ID NO: 557030 - DNA, 201 bp, Homo sapiens
cgaggtgatgatcaattttccaaaaaacaatacattttttataaaaataaatcttgagaaaacaagtcaattacgcacattttttaaatactaagaaacakaaaaaaaaaaaaagaaaatcccagacaaaataactattttaaaaaaagaaaaactcttttggcaaaaggtaagcatgaaatggtaacctgcttcattaat

SEQ ID NO: 557031 - DNA, 201 bp, Homo sapiens
actgtatgtttaataaaaaatcttgcaaaagttaatcaagtacttcatgggacaaaaagattctcactgctattgctacattacattctcaaagatgatcrtcagcttaatcacagtgctaataagttatgtatccaacagactattgcttaggaaagaggtaagcagaaacacttacaaacacaaactaataatacaaat

SEQ ID NO: 557032 - DNA, 201 bp, Homo sapiens
aaaagttggcaataaaacatttaacaactatttaatgtttgatgttttcaaatgaaattgtgcatttaattcctaattgttcataatgaaaggaaccaggyttcatgtacactacatgaaggggtgtagcctcgtctttcaaatgagaaagcatatcctctgtgtaggttattcagaaaatgcagcttcttaatttttatc

SEQ ID NO: 557033 - DNA, 201 bp, Homo sapiens
aatcttttttttttaaatatatgatttaaggaaatgaaaaacaaattactaaataagttttatgccaccaaaagttttaactgttagtaaattgatcatarataattttacaattagacacctgatgagagacagatgaggggaggaagagctatttaatagaacgctagggaaagaaaaacaaaaaacccaacagaaaac

SEQ ID NO: 557034 - DNA, 201 bp, Homo sapiens
aatataggtcaatagctgcttatatctattcatcatttctggaaagtttgtctgtgagaaaagaaaaatgaattatcagatgcaaatttaggtactaaaayatgtacacatgattaaggttatagaatacactactacataatgaaatgtagttcatatagttcctgatatagttttgtaaaagaggaactatgtatgaca

SEQ ID NO: 557035 - DNA, 201 bp, Homo sapiens
agaataatttcttgtgactgcactccgaatataggtcaatagctgcttatatctattcatcatttctggaaagtttgtctgtgagaaaagaaaaatgaatyatcagatgcaaatttaggtactaaaatatgtacacatgattaaggttatagaatacactactacataatgaaatgtagttcatatagttcctgatatagt

SEQ ID NO: 557036 - DNA, 201 bp, Homo sapiens
tatcaatgtctagggtaaagcttttcctcaatatttcttagagttttaaaagtgtaaactgctgcttagcaatttaacattataaacaactttggttcttrgttaatgtgaccaaatgtgaatgaaataaactatctgaaataaagatgacgtttcctttaataatgaaaagcaacctaattcaacaaataaattaaaata

SEQ ID NO: 557037 - DNA, 201 bp, Homo sapiens
tgttttaagacatccacaatcagttttccactgaaagacacaggtgcattcgtgcgtgcgcagacagacagacacacacacatggataataggaaaactaagtagtagatactttataaaatcttgtggctacagaaaatagcgtaataaataacctcagaagataaaaattctacaaacttttctaagaaaatacaaaag

SEQ ID NO: 557038 - DNA, 201 bp, Homo sapiens
tgaaattggtcaatttctttaaaagagcttcataattttaaggaatatcccatccaatgacagcatttagaaacatatctatactttgcaatagacagaamgaaaacagcttaatgccatgcagcttcattaagtggcatttctttgacagtggcaaagaaagtaatagaatccagttggcagaaagaacataccttcaat

SEQ ID NO: 557039 - DNA, 201 bp, Homo sapiens
ttttaagacatccacaatcagttttccactgaaagacacaggtgcattcgtgcgtgcgcagacagacagacacacacacatggataataggaaaactaagtagtagatactttataaaatcttgtggctacagaaaatagcgtaataaataacctcagaagataaaaattctacaaacttttctaagaaaatacaaaaggg

SEQ ID NO: 557040 - DNA, 201 bp, Homo sapiens
aatcttaccttactaaattcgtcattgctaaaatttctggatcatttttgtacggcttggcctaaacacagtaaagaaaaaaattaaatatatgtacaaaraaacaacattttaaaaaaagaaataacatttatttccagatagctgataagagaaattaacaattaaaacacacgtacctcctgtgagtcaaatggattt

SEQ ID NO: 557041 - DNA, 201 bp, Homo sapiens
atggtgaaagcccgtctcttctaaaaacacaaaaaattagctgggcatggtggcatgtgcctgtagttccagctactcaggaggctgaggcaggagaatcrcttgaacccaggaggcagaggttgcagtgaaccaagattgcaccattgcactccagcctgggtgacagagcggggaaaaaaaaaaaaaggcaaatactgt

SEQ ID NO: 557042 - DNA, 201 bp, Homo sapiens
tgaagaaagcaatctgtggataagggttgggaggactgctgtacgtatgaaatgttttaatgtttatgtttttatctaggagatttattattgtcttcccmaaatcttcacaactgctttagaaccacttattcaattaaaaagcccttcctaagtcccttccacatgccaggcactgggtctgtcatggggaaatacaaa

SEQ ID NO: 557043 - DNA, 201 bp, Homo sapiens
accataagatcttgcaatccactcctgggtttatccaaaggaaagaaaatcggtctattaaaggaatacctgcactccatgttcattgcagcattattcayaacagcaaagacagggaatcaacctaagtgtccatcaatggataaacggatgaagaaaatgtggtatatatacataatggaatattatttgactataaaa

SEQ ID NO: 557044 - DNA, 201 bp, Homo sapiens
agaaccacttattcaattaaaaagcccttcctaagtcccttccacatgccaggcactgggtctgtcatggggaaatacaaagttaaaaaagccaaggttcycggtctcaaaaagttcacactctagtagaagattaatctgtcagtagataaattacaatgtaagtgacaatgactaggtgaagcataaaccaagtgccta

SEQ ID NO: 557045 - DNA, 201 bp, Homo sapiens
cctgaggcacagcacaaagaacaagaaaacttgagaacaatccctgaaacctaaccaagaattgaattacaataaagaaaacagcagaggtggatgggacaaaaaaaaaaaaaggatagaactatggaaatatatacatatataaaaccacttctgtttccaagtttcatgtgggggtaaatgataggtgacatcctgtca

SEQ ID NO: 557046 - DNA, 201 bp, Homo sapiens
aaaaaaaaaaggatagaactatggaaatatatacatatataaaaccacttctgtttccaagtttcatgtgggggtaaatgataggtgacatcctgtcaatragctgctaaatccacattacagtacatatcttgcagcaaaagggaaatcagagaaatacgactatcctaactttgaagctgtatcttggcactgaaatag

SEQ ID NO: 557047 - DNA, 201 bp, Homo sapiens
cttcatgtacactacatgaaggggtgtagcctcgtctttcaaatgagaaagcatatcctctgtgtaggttattcagaaaatgcagcttcttaatttttatmttctagaaagctaccagcaactgtgaaaattttcaaaaggaacatttctcaatcccctgttgcagaaggccaaagactgatttatattcataattctctg

SEQ ID NO: 557048 - DNA, 201 bp, Homo sapiens
aaatgcttctttccttgactaactgaacatatgtatttattagggtgaggaataaactaataatgctgcaattatcttgcttatgacaatacattctgccytgaggcacagcacaaagaacaagaaaacttgagaacaatccctgaaacctaaccaagaattgaattacaataaagaaaacagcagaggtggatgggacaa

SEQ ID NO: 557049 - DNA, 201 bp, Homo sapiens
gccaaaattaaggtttctttaaaaaaagttaaatgaggacattttacacaggaactttaatatcatgaaataagctatcttctccaagtatacacaatttrtatgtaggtgacccataatgtacagtctaatagtgttttctgttaaatgaaaaagtactataaatagaacttctggtcacctaaattatttacatatatc

SEQ ID NO: 557050 - DNA, 201 bp, Homo sapiens; identical to SEQ ID NO: 182308

SEQ ID NO: 557051 - DNA, 201 bp, Homo sapiens
acatttttctatatttttcccacctaacaaaattgggataatatggattataccgtctttgatattttttgaacttaacatttatattgaatacatgttcrctatgtacatagcactggcaatcgaccatcatctttctactgatctttttattaaaaggatgacaaatacgagagtctgtaagagatcctgtagctaaga

SEQ ID NO: 557052 - DNA, 201 bp, Homo sapiens
actgtactccagcctgggctatacagcaagaccctgtctcttaaaaaaaaaaaaaatgattaaaagtaaagcccttaagttatgtttaatttaaaaaatgtattattataataaaatgttaccaagttagagtgactcttaaatgcaagactggtatactgcatttataactataaattataaacatcattaaaatctatg

SEQ ID NO: 557053 - DNA, 201 bp, Homo sapiens
ctgtactccagcctgggctatacagcaagaccctgtctcttaaaaaaaaaaaaaatgattaaaagtaaagcccttaagttatgtttaatttaaaaaatgtattattataataaaatgttaccaagttagagtgactcttaaatgcaagactggtatactgcatttataactataaattataaacatcattaaaatctatga

SEQ ID NO: 557054 - DNA, 201 bp, Homo sapiens
tgtactccagcctgggctatacagcaagaccctgtctcttaaaaaaaaaaaaaatgattaaaagtaaagcccttaagttatgtttaatttaaaaaatgtattattataataaaatgttaccaagttagagtgactcttaaatgcaagactggtatactgcatttataactataaattataaacatcattaaaatctatgaa

SEQ ID NO: 557055 - DNA, 201 bp, Homo sapiens
tcctcttgaaataattctgtaaagctctatgggaattgctaaaggtgctgagaaggaagaatccaaccttgtggatatggcaccattgtctgctttatacktaagacattatcatcagctatactgcacgccctctgctagtgcttccatctgttgggtcccaatgtaacctcatattaggggcacgtgattcaagtgctt

SEQ ID NO: 557056 - DNA, 201 bp, Homo sapiens
ccgcttctggctttgcctttgtttgaatatctaattctctgcttaacaggatcaagaagaggactgtaagagcaggaaaatttcacattttcagaaaacactctctatttatgcatgactgctgatggcatattgaatagaacagagtaccacccacccaatatctgttgttactttcaaaagacaaaaaccttacatata

SEQ ID NO: 557057 - DNA, 201 bp, Homo sapiens
ttaagtgttaatattctaacaaaacatgtaagtttaccttcctctattggcattacataaaatttaaatgtaaagagtacaaactgcctgaaaaaaatgayatctagtagaaaagacattaaatgaggctgattctgatctgaacattctttgattacgagtacaaaaagtatcaaatattctaagaaatactaaatgaca

SEQ ID NO: 557058 - DNA, 201 bp, Homo sapiens
aggttatagaatacactactacataatgaaatgtagttcatatagttcctgatatagttttgtaaaagaggaactatgtatgacaggaacattgtaattaycttaaatttgaaatgactagattactcaaaccaaatgtataaagttagcttatgaaacaagtacaactgctaaattttccaaatttcagaaattgtcatt

SEQ ID NO: 557059 - DNA, 201 bp, Homo sapiens
cgcttctggctttgcctttgtttgaatatctaattctctgcttaacaggatcaagaagaggactgtaagagcaggaaaatttcacattttcagaaaacactctctatttatgcatgactgctgatggcatattgaatagaacagagtaccacccacccaatatctgttgttactttcaaaagacaaaaaccttacatataa

SEQ ID NO: 557060 - DNA, 201 bp, Homo sapiens
ctgatatagttttgtaaaagaggaactatgtatgacaggaacattgtaattatcttaaatttgaaatgactagattactcaaaccaaatgtataaagttascttatgaaacaagtacaactgctaaattttccaaatttcagaaattgtcattgcacaacatatttaaatcataaaacctactacaatattcataagccaa

SEQ ID NO: 557061 - DNA, 201 bp, Homo sapiens
gcttctggctttgcctttgtttgaatatctaattctctgcttaacaggatcaagaagaggactgtaagagcaggaaaatttcacattttcagaaaacactctctatttatgcatgactgctgatggcatattgaatagaacagagtaccacccacccaatatctgttgttactttcaaaagacaaaaaccttacatataac

SEQ ID NO: 557062 - DNA, 201 bp, Homo sapiens
cttctggctttgcctttgtttgaatatctaattctctgcttaacaggatcaagaagaggactgtaagagcaggaaaatttcacattttcagaaaacactctctatttatgcatgactgctgatggcatattgaatagaacagagtaccacccacccaatatctgttgttactttcaaaagacaaaaaccttacatataacc

SEQ ID NO: 557063 - DNA, 201 bp, Homo sapiens
catggagaaaccctgtctctactaaaatacaaaaaattagccgggcatggtggcgcatgcctgtaatcccagccacttgggaggctgaggcatgagaatcrcgccactgcactccagcctgggcaacagagtaagactctatctcaaaaaaaaaaaaaataaataaaaataaaaaaataaataaataaataaaaccattga

SEQ ID NO: 557064 - DNA, 201 bp, Homo sapiens
catggtggcgcatgcctgtaatcccagccacttgggaggctgaggcatgagaatcgcgccactgcactccagcctgggcaacagagtaagactctatctcaaaaaaaaaaaaaataaataaaaataaaaaaataaataaataaataaaaccattgataatttatttgcagacatttttctatatttttcccacctaacaaa

SEQ ID NO: 557065 - DNA, 201 bp, Homo sapiens
agtgtatttaaaatcatgacaaaaatcttctctctggtcatgttgcccatgacaaattactatgatgttgtacgtttagggcaagatgtcaatacagcataaatcccatggtattttggttttcttctggagattaaagctgtttttcttgggataaatgcagcagcaaaacacaaaccagttgatcaaaaaagcacttct

SEQ ID NO: 557066 - DNA, 201 bp, Homo sapiens
tcaggaggctgaggcaggagaatcacttgaacccaggaggcagaggttgcagtgaaccaagattgcaccattgcactccagcctgggtgacagagcggggraaaaaaaaaaaaggcaaatactgtaaatgcatctaaaagagtaagttttcttaaatagaaaacttctgtatcctatgaagaatttgttttttttacttag

SEQ ID NO: 557067 - DNA, 201 bp, Homo sapiens
aaaattaaaataacattttatttaacagtttgtatgatatctttatggatcattatgtactcctaattatcttctcaaaatacatcttcctgcttggcaakgatataaagtgtttagattttaaaatacctgggtcaatggatggacagtatgatcagctgctgcctatcccataatttcttgttcccacctccttgattt

SEQ ID NO: 557068 - DNA, 201 bp, Homo sapiens
ggaaatcagctcttttctaattgttttattaagttggaacaaatataaacagatttaccatatatgatttatcatacaataactaaaataaaaacttcacktaacagtgttgaataagatagaggaatagcttgctgaaccagaaaattacttttttttgcaacccaaaccttcagaatgcagccttgaacctggaagtaa

SEQ ID NO: 557069 - DNA, 201 bp, Homo sapiens
catttagaaacatatctatactttgcaatagacagaaagaaaacagcttaatgccatgcagcttcattaagtggcatttctttgacagtggcaaagaaagkaatagaatccagttggcagaaagaacataccttcaatgtgttctcttatgaaaggatcatccatgatgttgctgtgatttgtttttagaatcttttcaaa

SEQ ID NO: 557070 - DNA, 201 bp, Homo sapiens
tagaacatacatgatcatgcatgtatgttgaatttcttttatattcgtttctttttttttttttttaaataacaagtttgttttattttagattcttcttsggcagaaatcattatttactttcttgggtaaaaacagtacagttttagaaacagacttaatttttcaggtggtatcctaactacctatttctaccagatt

SEQ ID NO: 557071 - DNA, 201 bp, Homo sapiens
ttaaaaagaaatcagttatgttacattaagatgtagagaaaaagtatttaatcaacaactttaatgtaagagcaagagtgagtaatggaaatccagctctkgtagtagagagcatctacttgtggcagccaaagatttctttgcagtaacttttagctaggtttagggataaaaagaagaatgagatgaacacattacaat

SEQ ID NO: 557072 - DNA, 201 bp, Homo sapiens
attattctgataggcactaatagaaaaacaaagtgtaaattatgtcaaacatgaagaagttatgtattaaatcagataatccaaagaccctgcttctcaaytttcatatgcaaaaatctaaataatattatactttctgtcatggaaatcacagttaaacaagcacacataaccttctgccaaaaaaaacataaatttcct

SEQ ID NO: 557073 - DNA, 201 bp, Homo sapiens
acatggtgaaaccccgcctctaataaaaacacaaaaaattagtcaggtgtggtggcaggcgcctgtaatctcagctactaaggaggctgaggcaggagaawcgctcgaacctgggaggcggaggttgcagtgagctgagattgtgccactgcactccagcctgggcaacagagtgagactctgtttcaaaaaaaaaagtta

SEQ ID NO: 557074 - DNA, 201 bp, Homo sapiens
aatgcaagactggtatactgcatttataactataaattataaacatcattaaaatctatgaatataagtaccttagaaataaaaggaatatgtattcttgwgtaaggcttaattaattttataagcacttgtgttctgatgtttcgcaaaagctctgaaagacaaaaaattaaaataacattttatttaacagtttgtatg

SEQ ID NO: 557075 - DNA, 201 bp, Homo sapiens
actatatttatacaaagttaattaaaatcacctcaatatcttacttctcttaaaagttggcaataaaacatttaacaactatttaatgtttgatgttttcmaatgaaattgtgcatttaattcctaattgttcataatgaaaggaaccaggcttcatgtacactacatgaaggggtgtagcctcgtctttcaaatgagaaa

SEQ ID NO: 557076 - DNA, 201 bp, Homo sapiens
tttaataaaaaatcttgcaaaagttaatcaagtacttcatgggacaaaaagattctcactgctattgctacattacattctcaaagatgatcgtcagcttratcacagtgctaataagttatgtatccaacagactattgcttaggaaagaggtaagcagaaacacttacaaacacaaactaataatacaaatgcaatttc

SEQ ID NO: 557077 - DNA, 201 bp, Homo sapiens
aaagttaattaaaatcacctcaatatcttacttctcttaaaagttggcaataaaacatttaacaactatttaatgtttgatgttttcaaatgaaattgtgyatttaattcctaattgttcataatgaaaggaaccaggcttcatgtacactacatgaaggggtgtagcctcgtctttcaaatgagaaagcatatcctctgt

SEQ ID NO: 557078 - DNA, 201 bp, Homo sapiens
aaaaacaaagtgtaaattatgtcaaacatgaagaagttatgtattaaatcagataatccaaagaccctgcttctcaactttcatatgcaaaaatctaaatratattatactttctgtcatggaaatcacagttaaacaagcacacataaccttctgccaaaaaaaacataaatttccttttcatgcttttggttttttaaa

SEQ ID NO: 557079 - DNA, 201 bp, Homo sapiens
agcattgaaaacacttgcacaaacatttgttttatatttgtgtacatacatattttaaccgtaagacattcttccatttcttaagtggggtttcaaaaaaracatcttatacaaaattgtgggacaccatgcatcacatcatgtgggtcaaaatttaccattaaaataagttttgagttctaatacagtggctttgctgga

SEQ ID NO: 557080 - DNA, 201 bp, Homo sapiens
gttttaagacatccacaatcagttttccactgaaagacacaggtgcattcgtgcgtgcgcagacagacagacacacacacatggataataggaaaactaagtagtagatactttataaaatcttgtggctacagaaaatagcgtaataaataacctcagaagataaaaattctacaaacttttctaagaaaatacaaaagg

SEQ ID NO: 557081 - DNA, 201 bp, Homo sapiens
atgaagaaatattcagaaaaaaataagggaaagctacctggcacgactgatgtaactggcgtaaaattttttgaagctttccatattcctctcgttctaartataattttccaagctgcaagaaagcaaatttattaaaatcaagatttcaacagaagatgtgcatctttaggagactttattaaaaacacccacccactt

SEQ ID NO: 557082 - DNA, 201 bp, Homo sapiens
ggggacgccgaggtatgtctgactctgtcctgcccctgtgagcactggctaagctcccatgtgggtccgccctcgtgctcatcacagctgtgagcgggagygtgggctccaggcctctgggcattcccgggaagccttcctcatctctgtccgcgctgtgagcgggtgatttgtcatcacggtagcgtcttcgtcttccca

SEQ ID NO: 557083 - DNA, 201 bp, Homo sapiens
ccaggtcgcccaggctggtcttgaactcctgacgtcgtgatccacccacctcggcctcccaaagtgctgtgattacaggtgtaagccaccacacctggccrgaccacattgttttaatccgttaatctgtcggtggacgcaggtcacttccatgtttcagctcttgtgaatagcgctgctatgaacataggtgtggttgac

SEQ ID NO: 557084 - DNA, 201 bp, Homo sapiens
tgtgaacacaccttcctggggcacagtggggcctgttattatttcaggcttccagaaggttccatcaagcagagacatgatgagctgtgttggaataacakggaacaacttaatagtattaaatcctgaattagattctaacttctgccttaggatatgagctttattttgtacatgaaatcaggagagaacatttcttaa

SEQ ID NO: 557085 - DNA, 201 bp, Homo sapiens
agcctccaagtagctgggactataggcgcccaccaccatgcctggctaaacggggtttcgtcatgttagctaggctggtctcgaactgctgacctcaggtratctgcctgtctcggcctcccaaagtgctgggattacaggcgtgagccactgtgcccagccaagaaaaattttctgtataaatgtagtgcagcctggtgt

SEQ ID NO: 557086 - DNA, 201 bp, Homo sapiens
gagctcccagtggcctttgtgctcagagcccattcagcacaccccagtcatctgaataagcccagagccttgccattgtccccatggttgcccatcaaccrttcgccctcctgcaccgactgccagtttccatggttaccgccaccgctgtaaatgtgatctctgcgccatgggggagggggctgtcagcggctccatata

SEQ ID NO: 557087 - DNA, 201 bp, Homo sapiens
gtcagtggcttaatatagcctctccctggtatttgcatttcaaaagaggtctctgtgaaattattctggaagggatttcagggcccctgagtggggacacrtttcaggcctaggaggggtggctcctccaagttcctggcagatgctgcagcctgcatttctgaggagggctgggcccgaggcagctgccaccatgggctg

SEQ ID NO: 557088 - DNA, 201 bp, Homo sapiens
tgggattataggcacacaccaccacacctggctaatttttgtatttttagtagagtcggggtttcaccgtgttggccaggctcctgacctcaggtgatccrcccgcctcggcctcccaaagtgctgggattacaaacgtgagccaccacgccccgcctggaatcggtttttatgtgttggaaaaaaggacttcctgtgtgt

SEQ ID NO: 557089 - DNA, 201 bp, Homo sapiens
ggcgcgcaccaccacacccggctaattttgtatttttagtagacatggggctttctccgtgttggtcaggctggtcttgaactcccgacctcaggtgatcygcccgcttcggcctcccaaagtgttgggattataggcgtgagccaccacgcccagccgtaaacgaccctctttaattcagtgacccagccttcctcttgc

SEQ ID NO: 557090 - DNA, 201 bp, Homo sapiens
gctggatgggggctgccccagcgagggcagtggaactgggccgggaggcggaatctgagtgcagggtctcagctgtgagccatcagcaacccacaccccakagccccgtcctggaggggaagggtggggggtatacctcagcacctacccttgatagcacctgatttcttttttttcttgttgtttgtttgagacggagtt

SEQ ID NO: 557091 - DNA, 201 bp, Homo sapiens
ggctcactgcaacctcggctgcccagatttaagcaattctcctgcctcagcctcccgagtagatgggattacagttgtgtgccaccacacccagctaattytgtatttttagtagagatgaggtttcaccatgttggttaggctggtcttgaactctcgacctctggtaatctacccgcctcagcctccccaagtgctggg

SEQ ID NO: 557092 - DNA, 201 bp, Homo sapiens
gggacaaagccacagccacactcttcaacggttaccaaactgtttttggaaattcacaccaaggtcgggcccactgcaggcagctggcacagcgtggcccraggggctgtggaacgggtcccggaactgtcagacatgtttgattttagcgtttcctttgttcttcaaatcaggtgcccaaataagtgatcagcacagctg

SEQ ID NO: 557093 - DNA, 201 bp, Homo sapiens
agctgcaaagagcacgtctgaggtgctcatcccccaggcctgagggctggattgacggcgggtacggacaggcatccctggggtgggaaggggtggcagcyccagagcttttcccgcagtgacttgtgcttgctgacttgggaatgactcagcgaggcaggacagggctgggcaattcattcagaaacacccctcttattc

SEQ ID NO: 557094 - DNA, 201 bp, Homo sapiens
agcctcctgggtggggaacggtctgcttgggagctggagcaggaataaccacgtgcaggggagggcccacgggtgcaggccctggaggctgagggagggcragtgtctccgagggggtcatccgtgatggatgccgtctggcggttggagagcctggggacagagatgtgatgggttagccaagggcaggtccttggtggc

SEQ ID NO: 557095 - DNA, 201 bp, Homo sapiens
tggtgctaaattgggtcagagatattacaggagagttttagagcttatatttcctgtggccagtgcttgtcctggcagtaaggatctcccctgtaacaagycagagcccccaaggcaccagactcttcttactacacaggtaccaacaggctggcaggttagagttggtggagtttgcagagagatatttcctcttcgttg

SEQ ID NO: 557096 - DNA, 201 bp, Homo sapiens
caccccccagaccaccaccgccccaacacacacccggatgacagtggttacctttgactgggttccagcaggcggttttctttactcttttatttgcgctstcatgtgtttccctggtaaccgggagctgagtggtgtcatgctgctgctcattttacagatgcagacactgaggccctggggtgttgagtggccttctca

SEQ ID NO: 557097 - DNA, 201 bp, Homo sapiens
caccaccccccagaccaccaccgccccaacacacacccggatgacagtggttacctttgactgggttccagcaggcggttttctttactcttttatttgcrctctcatgtgtttccctggtaaccgggagctgagtggtgtcatgctgctgctcattttacagatgcagacactgaggccctggggtgttgagtggccttc

SEQ ID NO: 557098 - DNA, 201 bp, Homo sapiens
ggattataggtacccgccatcatgcctggctaatttttgtatttttgtagagatggggtttcaccatgctggccaagctggtctccaactcctgacctcargctatccgcccgcctcagcctcccaaaatgctgggattacaggcgtgagccaccgctcccagcctgggtcggaccatcttaaattgcttcagtggccaag

SEQ ID NO: 557099 - DNA, 201 bp, Homo sapiens
cattgcattatccctgactttcagcaagggtctggcggtgatacacagatgctgttggggtgtcctcaggccacatccttcatgcccccactccccacctsaccaggactggttctgactgactggcagccagaggtgtgtggccttgggcccccggggatcagagtgcaggtggacctgactccagccctcacctggatg

SEQ ID NO: 557100 - DNA, 201 bp, Homo sapiens
cctttaccttgactgcaaggttaacacaggactttgttcccgaggcatcgtgagcagcacgtgggcctttctacagtccggcttgctggagacgctcgtgmtgggatgagactctgctctcctgggtccgaggctcactcttcctctcgtggcttgacatcctgacatgcgccgcacacccaaccctgaaagtgcttgtcc

SEQ ID NO: 557101 - DNA, 201 bp, Homo sapiens
aaacttacaggttcagttttggtataatacaaaccttccgcacaattttggcagtacagtctatttgtcggtgaatattttaggtttgtgagattgtaaaygtgtagagaatatggaataggcccttaagggcgaattaaccggggttatggatattcttaggaagtttttcttctataccactttatcttatagataaag

SEQ ID NO: 557102 - DNA, 201 bp, Homo sapiens
ctcaggttatggacacagaagtgagggtgctggcagttaggaggggacccaggcccagccttgaggagccatggcccgaatagcctcctgggtggggaacrgtctgcttgggagctggagcaggaataaccacgtgcaggggagggcccacgggtgcaggccctggaggctgagggagggcgagtgtctccgagggggtca

SEQ ID NO: 557103 - DNA, 201 bp, Homo sapiens
tgttggggggcgcgtgggacgtcttccagctcaacgagagctctggcgtggtgagtacacgggcggtgctggaccgggaggaggcggccgagtaccagctsctggtggaggccaacgaccaggggcgcaatccgggcccgctcagtgccacggccaccgtgtacatcgaggtggaggacgagaacgacaactacccccagt

SEQ ID NO: 557104 - DNA, 201 bp, Homo sapiens
gctactgtggccaagcttcgtagacgggtttgccaggacagtaacttctgcctctctctgagtcatcagacctggagggaatggaggagcaggaggcggaygggaaaaaggggcctgggagaatggaaggggccacaggtccacgggacatggactcaccagggcagggcgcccacctcagcaccagctgcccggggacaa

SEQ ID NO: 557105 - DNA, 201 bp, Homo sapiens
ccagcgaccgcgactcgcccatcaacgccaacttgcgttaccgcgtgttggggggcgcgtgggacgtcttccagctcaacgagagctctggcgtggtgagyacacgggcggtgctggaccgggaggaggcggccgagtaccagctgctggtggaggccaacgaccaggggcgcaatccgggcccgctcagtgccacggcca

SEQ ID NO: 557106 - DNA, 201 bp, Homo sapiens
aggtctatgtctggccccatgtaccgaccagggtgttgagagaccatttttaaaagtctaggtgaagtagcaggcaggtgaaactccgggcaagttcccaragccctgggcaggagccggcaggaggggcggtgctggccacgcctggagcgggcccatgttgctgggcgtgccagaaccccacgctggccccagtgtcgc

SEQ ID NO: 557107 - DNA, 201 bp, Homo sapiens
gctgccgctgcaagtccgcttggtggcccgcagtgccccgacggcgctgagccgccgcctgcgggcgcgcacgcaccttcccggctgcggagcccgtgccsggctctgcggaaccggtgcccggctctgcggggcgctctgcttccccgtccccggcggctgcgcggccgcgcagcattcggcgctcgcagctccgaccac

SEQ ID NO: 557108 - DNA, 201 bp, Homo sapiens
gcacgtcttccctgggctctggcggccccgactgcgccatcacagtcaagagccctgggagggagccggggcgtgaccacctcaacggggtggccatgaaygtgcgcactgggagcgcccaggccgatggctccgactctgagtgagtagcctgggcctccagggcggggatcacccacttcccccttgtcctgagtcagg

SEQ ID NO: 557109 - DNA, 201 bp, Homo sapiens
cgggcaagttcccaaagccctgggcaggagccggcaggaggggcggtgctggccacgcctggagcgggcccatgttgctgggcgtgccagaaccccacgcyggccccagtgtcgctgctgaagggtccccttgggtttgggctggtgcctgtgcctgcacattttgaaacccgatagcagaacctgttgaggaaggggata

SEQ ID NO: 557110 - DNA, 201 bp, Homo sapiens
ttttttcttcttttcctgtaacctgaacacacgggttcatataaatgccccaaattccctagaatgaaattccttaatgctgggaggggttgtagtaaacraccctcttttttttttttttgagacagagttttgcttttgttgcccaggctggagtgcaatggtgcgatctcagctcactgcaacctctgtcccctgggt

SEQ ID NO: 557111 - DNA, 201 bp, Homo sapiens
ctcacactgctttctgtgtccaggcaggcagggctggctcacctgctggctcagctgctccgtggatgttgattttcaattcctggctctcagccattggycagacatgtagccctgctcagctgaggacagacacatagggtggtccgaattgtgagctctcccatcccccacccctcactcatgcctgtctgacctcag

SEQ ID NO: 557112 - DNA, 201 bp, Homo sapiens
aacagagttatgaagtactggatttggaaaaacctggtttttgtagaacagatggaatgaagacctaaaccgagcattgcctacttagcccctgaattaasagagtccagtcgagacaaacccctggcaacaggaaattcaagggaggaaaaggaagcaacttgggctaggatgagctgactccctgagagtgaaggagag

SEQ ID NO: 557113 - DNA, 201 bp, Homo sapiens
ggctggggcatcccggccattgtcacaggtgaggatgcacagagtggccctgcataaaaccacagatttccaacagaccccagctgtgcaggaacgctgcyctcctttctcttccctgcccagccccaatgcttgtccagcccccagcagaggaggcctcggccctgcacactgcgagtgcatgcacaggggcactcgcag

SEQ ID NO: 557114 - DNA, 201 bp, Homo sapiens
tgagaagggagatgctgagtcccccatttcaccccaccctggctggtccttggcatggggtggccactgggcacgtggccctcacccttcccttcctcccygctgtgttcaggactggcggtcggcctggacccccagggctacgggaaccccgacttctgctggctgtcgcttcaagacaccctgatttggagctttgcg

SEQ ID NO: 557115 - DNA, 201 bp, Homo sapiens
ctctggtcttcctcagcagcccccggcccagatacgccccctgcctcatggggccaatccaggagcagctcctgccacctgggccagtgagcctgagaccytacacggagagactgtgcttggaggggccctgggctggctccctggactccttgctccttcctctgagaagggagatgctgagtcccccatttcacccca

SEQ ID NO: 557116 - DNA, 201 bp, Homo sapiens
tgcagggagtgaggatgggggggacgcccaccaacgtcgccaccctgaacatgaacaacgcactcaaggtcagggtgaaggacggctgtgatgtggacgayccctgtacctcgagcccctgtccccccaatagccgctgccacgacgcctgggaggactacagctgcgtctgtgacaaaggtgggaccgccctcccggggc

SEQ ID NO: 557117 - DNA, 201 bp, Homo sapiens
aggatactctcttgggttaaggttgctggtgagcggccgtgcccctgtgccatgtggcataacgcagtcacagcttctggggattgagacatgcagctctycttgggaagtgagggtgagacattattttgtctaccacacatggccatggccaagatttataaaagtcagccgggtgcagtagctcatgtctgtgatccc

SEQ ID NO: 557118 - DNA, 201 bp, Homo sapiens
caacttctcactctgctgagtgggaaaaggcaacccccaaaaggaccatactatgtgattccgtttgtatgacattgtgtttttttgtttgtttgcttttyagacagagttttgccttgtatcccaggctggagtgcagtggcacgatctcagctcactgcaacctccacatcctgggttcaagtgattctcctgcctcgg

SEQ ID NO: 557119 - DNA, 201 bp, Homo sapiens
agtcgagacaaacccctggcaacaggaaattcaagggaggaaaaggaagcaacttgggctaggatgagctgactccctgagagtgaaggagaggcagcccycgttaccaaataccatttctgcctggggctttcgcagcttgcagtgttcctgctccggcatggcaccttattgttttgatagcaacctcattgtattctc

SEQ ID NO: 557120 - DNA, 201 bp, Homo sapiens
agcttccagttacagtttgcttataagatgtgaaacttacaggttcagttttggtataatacaaaccttccgcacaattttggcagtacagtctatttgtyggtgaatattttaggtttgtgagattgtaaacgtgtagagaatatggaataggcccttaagggcgaattaaccggggttatggatattcttaggaagttt

SEQ ID NO: 557121 - DNA, 201 bp, Homo sapiens
cccaagggcagacgtgggtgctgacagacagcagttcccggtgggagctggggaggaggagagggagtggggcatggaggggtgaacagagggtgcctccygtctcaggaaggcagtgaggaacaggaggaacagggaccagtaatagtaacctcgcccttgcgcaggtgcgtagctcacagccgtaccaaatgagctgtt

SEQ ID NO: 557122 - DNA, 201 bp, Homo sapiens
gcagttcccggtgggagctggggaggaggagagggagtggggcatggaggggtgaacagagggtgcctcctgtctcaggaaggcagtgaggaacaggaggracagggaccagtaatagtaacctcgcccttgcgcaggtgcgtagctcacagccgtaccaaatgagctgtttcactcacatcagcctgttagtgctgggga

SEQ ID NO: 557123 - DNA, 201 bp, Homo sapiens
gccgcccgacacaccgacttcgccccttccagttgtcatggggattgtgcaggggacaggatgtgtccctcagagctgcgggccttgtttggaggcttacrcgtgtcccaagcacagggggcaggcctgtaagaggggaatcatgtagcaaggaggctggcccagagcaggggtgattgagaagtgggcgcgggaccgcct

SEQ ID NO: 557124 - DNA, 201 bp, Homo sapiens
aagccacgagcactgacttgctcatatgagtgtgcagctgggtgtgcaggtatgcacctgtgtgtgacaggatgtgaggtgtctgtgagggtgtgtcaacrcatgtgtatgtatgtgtgtgtgtgtgaacaggtgtatggacatgtgtagacgggaaattgagtgcatgtgtgaatacatgtggaaggttataagcattgt

SEQ ID NO: 557125 - DNA, 201 bp, Homo sapiens
tggaggcttacgcgtgtcccaagcacagggggcaggcctgtaagaggggaatcatgtagcaaggaggctggcccagagcaggggtgattgagaagtgggcrcgggaccgcctgggtctgtgtgcttcccaccaccgcggtgcctgttcagtctgtgcctgcatcgtctcagtgaaatcttacaggatccccatggtaaggg

SEQ ID NO: 557126 - DNA, 201 bp, Homo sapiens
gcaagagctacacaggtctttgctctcattatctggtattgcctctccagctacccagggaggcagaacagattctgctctggctgatggcccttcctctstcttcagggccaccagcatagaatcccctgacttcctctgtccccataagctctttctcccactcttcctccctcctctgcttttaaggatcctgtggcc

SEQ ID NO: 557127 - DNA, 201 bp, Homo sapiens
ggcctgtaagaggggaatcatgtagcaaggaggctggcccagagcaggggtgattgagaagtgggcgcgggaccgcctgggtctgtgtgcttcccaccacygcggtgcctgttcagtctgtgcctgcatcgtctcagtgaaatcttacaggatccccatggtaagggcagagaaactgaggctagagagcttgtagcgaca

SEQ ID NO: 557128 - DNA, 201 bp, Homo sapiens
aggtctttgctctcattatctggtattgcctctccagctacccagggaggcagaacagattctgctctggctgatggcccttcctctctcttcagggccascagcatagaatcccctgacttcctctgtccccataagctctttctcccactcttcctccctcctctgcttttaaggatcctgtggccacccagatcctcc

SEQ ID NO: 557129 - DNA, 201 bp, Homo sapiens
ggtgattgagaagtgggcgcgggaccgcctgggtctgtgtgcttcccaccaccgcggtgcctgttcagtctgtgcctgcatcgtctcagtgaaatcttacrggatccccatggtaagggcagagaaactgaggctagagagcttgtagcgacaggaagagccaggcgcagactctggggtctgtgtgctctaatcgtggtg

SEQ ID NO: 557130 - DNA, 201 bp, Homo sapiens
atgctgggcatgggcccgctgagcaggtgttctcccagcattggagacggcctgagatttcaccagagatgaggcctgggctgttctccactcactgcccygttcagattgcctgacgctgggtctgcctggccccctctggacctccgaaggtggaatggccatcccctggggccccttccctgctgcctctcacccttc

SEQ ID NO: 557131 - DNA, 201 bp, Homo sapiens
cgctgagcaggtgttctcccagcattggagacggcctgagatttcaccagagatgaggcctgggctgttctccactcactgccccgttcagattgcctgaygctgggtctgcctggccccctctggacctccgaaggtggaatggccatcccctggggccccttccctgctgcctctcacccttctgtaggttggggaatg

SEQ ID NO: 557132 - DNA, 201 bp, Homo sapiens
cagcattggagacggcctgagatttcaccagagatgaggcctgggctgttctccactcactgccccgttcagattgcctgacgctgggtctgcctggcccyctctggacctccgaaggtggaatggccatcccctggggccccttccctgctgcctctcacccttctgtaggttggggaatggaaaagcagagatccagcc

SEQ ID NO: 557133 - DNA, 201 bp, Homo sapiens
ttacaggcgtgagccactgtgcccagccaagaaaaattttctgtataaatgtagtgcagcctggtgttcagtgttgataaagtctgcaggagtgcacagtyatgtcctaggccttcacattcactcaccactcacccacttacccagggcaacttccagtcctgaaaccttcattcctggtaagtaccctatataggtgta

SEQ ID NO: 557134 - DNA, 201 bp, Homo sapiens
caaatgtgtgtgcaggtgtgtgtgtgcacatggcccgcctgcagggcggcggggtgcagcatctgtggtgggctgacccccatagcggggagtggtagggrggttagcctccaggggtgctgggagcctggatgagggtctagggctggctcctctctgcctgctttaactgagtggggtgggaaacccctctgttcccat

SEQ ID NO: 557135 - DNA, 201 bp, Homo sapiens
ggcggggtgcagcatctgtggtgggctgacccccatagcggggagtggtagggaggttagcctccaggggtgctgggagcctggatgagggtctagggctsgctcctctctgcctgctttaactgagtggggtgggaaacccctctgttcccatttccctgggggcagcccctgccagtgcagaacaggcggatgggatcc

SEQ ID NO: 557136 - DNA, 201 bp, Homo sapiens
ttctgggaaagaggcaggctcgccggcttcacagtgctcacctgtagtggggcccctgccccactgaacaggctccccagtactctaggggcggggcttckggcggcacagccagcaagtttcagggatgggagagggagtccagactgcagcctgtgagcccagactgcgggcgaggcaggaggaggaggcgggtcacag

SEQ ID NO: 557137 - DNA, 201 bp, Homo sapiens
tggttcaaagctgggcttccagtcctgcaaaggtggctctttttcgtttttatcgttagtgtaaacccctcagggttccaaccagaagccaaggaacaacmcttggcagtccatgaaccccagtttttaatcctccagccccatgaacctagaaagcttttaggcatcttgagactctaggtcacaggcgactgatggagc

SEQ ID NO: 557138 - DNA, 201 bp, Homo sapiens
agagtttcactttgggaagatgaaaggctctggagatggagggtgatgatggttgtataacagtgtaaaggtacttcatgcccctaaactgtgggtgcatwtaaaaatggttacagtgggccacacctgtaatcctagcactttgggaggccgaggcaggtggatcacatgaggtcaggagctcgagatcagcctggccaa

SEQ ID NO: 557139 - DNA, 201 bp, Homo sapiens
gactgcacgctcagcctccactgtgtcttccagaaccagctgacggccttgcagggaagcacacgccacgctgttttgcagattctgtcttttccttggtygtgagcctgaaactctgttttgcctggagccacttcagtgtcttcaaacagacattctttaatattttgtctcatgttcgtaggtgatttcaagaggaga

SEQ ID NO: 557140 - DNA, 201 bp, Homo sapiens
ggcccagggaaaaacagaatgaccccttgacgtgccaggacccaccagagaccttgtggatttggggaggcactttctgggtccccgcaggtgggcttctsttctgccctgtactgaggtcactggcatcttcctcacctccttcatccggatgccccgcccccggcagtcagcagctgacttcctccagctgcatttctc

SEQ ID NO: 557141 - DNA, 201 bp, Homo sapiens
cgtctcaaaaataaaagtggttaccatgttaagatccgtattatgtacattttattacaagaaaaaaatgctagaaggactaatgcaaactgttgcagacrctcaggtgtgggaggcgtgggagcgggtgcctgtgtctgtggtttcaggtatgatttccctgagagcttgagcactgaacgggttcctttggtcctgtcc

SEQ ID NO: 557142 - DNA, 201 bp, Homo sapiens
cttttctatatttagatatgtttagacttacaaatatttgcctttgtattacagttgcttacagtactcagtacagtaacatgctgtacaggtgtgtagcytggaagcagttggttataccacagcctaggtgtgtagtaggctgtaccagccatgtctaagcctagaagcagtcagttatactacagtctaggtgtgcag

SEQ ID NO: 557143 - DNA, 201 bp, Homo sapiens
catggatggggagcaaaactgggagagcagtgagacccaggtcctggacaggcctgtgagacaccagggagccacacatgtcccaggcaggcaggtggtgktatcccagacaatgttcggaacacttaaccaaactaggtttccacagtttgcaggcaggtaacccaagatgttgtctgtgaaatgcccacacacttaagg

SEQ ID NO: 557144 - DNA, 201 bp, Homo sapiens
atgttaagatccgtattatgtacattttattacaagaaaaaaatgctagaaggactaatgcaaactgttgcagacactcaggtgtgggaggcgtgggagcrggtgcctgtgtctgtggtttcaggtatgatttccctgagagcttgagcactgaacgggttcctttggtcctgtcctggggttcgaggccatccagggcct

SEQ ID NO: 557145 - DNA, 201 bp, Homo sapiens
cttatggctgaaacacaggaggggggctcagtttagacattagcgtccccagccaactccctgtggttccgtggagccctgagctttattttataacaagygggcccctcctagagagagactctgagcctcttccttactcaaggcacagagtgccccaggcgctctcctcagcacatggggtgatcagcaaagaaacag

SEQ ID NO: 557146 - DNA, 201 bp, Homo sapiens
tttcttcgtgttaaatcagataaccgaggcctcccttctcagtgggatctgcagtctgtccacccgaatgcccgagcacaccatcggtttgccttgtcgcwgtgcaatgtggtctgtgggagcccactcccttcgttctcctctaacgagactgagtgtggcacgggctgagcgcccctgctgatggtgcccccacaggct

SEQ ID NO: 557147 - DNA, 201 bp, Homo sapiens
gggcccctcctagagagagactctgagcctcttccttactcaaggcacagagtgccccaggcgctctcctcagcacatggggtgatcagcaaagaaacagkgaaaagtaaggccgggtgcagtggctcatacctgtaatcccagcactttgggaggccgaggtgggtggatcacttgaagccaggagttcaagaccagcca

SEQ ID NO: 557148 - DNA, 201 bp, Homo sapiens
aaccgaggcctcccttctcagtgggatctgcagtctgtccacccgaatgcccgagcacaccatcggtttgccttgtcgcagtgcaatgtggtctgtgggakcccactcccttcgttctcctctaacgagactgagtgtggcacgggctgagcgcccctgctgatggtgcccccacaggctctgactcctcagtaaggtctg

SEQ ID NO: 557149 - DNA, 201 bp, Homo sapiens
agagagactctgagcctcttccttactcaaggcacagagtgccccaggcgctctcctcagcacatggggtgatcagcaaagaaacagtgaaaagtaaggcygggtgcagtggctcatacctgtaatcccagcactttgggaggccgaggtgggtggatcacttgaagccaggagttcaagaccagccaggcaacatggtga

SEQ ID NO: 557150 - DNA, 201 bp, Homo sapiens
aaagtggcaggacctggtcttagggaacccccacctgccgcatggagcacagcttggagcagggggagttgccaagaggctgatccagcatctccatgccyggcgccacagtcaccactgctgcagggggatgaaggttctggggcccccacgctgcacacacacatccataaacgccagactctatctctggcctggttg

SEQ ID NO: 557151 - DNA, 201 bp, Homo sapiens
ggtttgcacacatcacgactgcctccctgttccagaatgagaagctgagccgcaatgagacgcaggtggacggcgccagggccctgcagctggtgagggcrctgcgcagtgctacacagcacacgggcacgctctttggcaatgacgtgcgcacggcctaccagctgctgggccacgtccttcagcacgagagctggcagc

SEQ ID NO: 557152 - DNA, 201 bp, Homo sapiens
ggagtctttataagagagaagacagagacagacacacaatgaggaggccacaacgtgaagatggaggcagagaccgcagccacactcggattacaggcgtrggccaccgtgcctggccccatcttaatttatatcttcatctgcagcctttatttccaagttaggtcacatccacaggtactgggcattggggcagggtag

SEQ ID NO: 557153 - DNA, 201 bp, Homo sapiens
tagcggagatgacaggcgcgcaccaccacacccggctaattttgtatttttagtagacatggggctttctccgtgttggtcaggctggtcttgaactcccracctcaggtgatctgcccgcttcggcctcccaaagtgttgggattataggcgtgagccaccacgcccagccgtaaacgaccctctttaattcagtgaccc

SEQ ID NO: 557154 - DNA, 201 bp, Homo sapiens
ggggaaccccgtctgtggaccctgccactgtgccgtcagcaaaggctttgatcccgactgtaataagaccaacggccagtgccaatgcaaggtgaggcccmgcccccatgatccctgcatgctgtgtttgctcacacacatgcacagctgcccctaaatacacacacgccttcacataccctgtcggtacacactcacacc

SEQ ID NO: 557155 - DNA, 201 bp, Homo sapiens
tacaccacggccatggcgctcacagtgacttgaaacccaaatgttaggtctgagggtaacaggagcctgggcgagggacgtgagcttcctgcagatgcggmtggccctaggagggaagctggtaccagggcacccttggatgccatctcgtgatgtcagtagtgtccccccccagtgcctgcggtggttccaacagcaaat

SEQ ID NO: 557156 - DNA, 201 bp, Homo sapiens
cgtgtgtcagggtgtctgtcgtttttaaggcctccttatttcttgtgctacctgaagttgggtttttttcagtaataataatgtgtaatgtttatcctgaytcatctaatgctgagggcctggggatgtggttctttcgtgctctcctccatatcttgtgacagaataattcttgtcatttctaggattttataatttagg

SEQ ID NO: 557157 - DNA, 201 bp, Homo sapiens
gcccaggcaatgtagctggtaaacggcaagggtcaggcatgaacccaggactttctgaacccgaagtacaagctcttgattgtcaccctgacccacccaayggtggacgttcaggtggcttctaatttttcaaaacaactttaaaaaaacgcccaagggctatccccatacgtaagcctccatttggatctctgattcttt

SEQ ID NO: 557158 - DNA, 201 bp, Homo sapiens
tcgtttttaaggcctccttatttcttgtgctacctgaagttgggtttttttcagtaataataatgtgtaatgtttatcctgactcatctaatgctgagggyctggggatgtggttctttcgtgctctcctccatatcttgtgacagaataattcttgtcatttctaggattttataatttaggagacgaggaaggatgtta

SEQ ID NO: 557159 - DNA, 201 bp, Homo sapiens
cccggaagaactgctctcctgggtccggccttgtggggccttgggaggcagcccccgttgggtgtgggatgtgggcagagggtagccatgaggggtgggayggctggcggccaacacacacacccgggtgggagtctggacgtcgctcgggaaacacgctgcaaggtagggcctctcccgggcatctgaagtcacaggccc

SEQ ID NO: 557160 - DNA, 201 bp, Homo sapiens
ggatatattaaatacacttatttgagttttacacaatgtctaggggtcaggaccaggcatcgggaccagacactggggcagggttggggtgggtgctggcygccgggggtgcttgtctgaggctaagactaggtgggaccaacgggaggatgtgtgaggacccacctgcagcagcccgaggggatggcagtggtggggtta

SEQ ID NO: 557161 - DNA, 201 bp, Homo sapiens
agctccagagcttttcccgcagtgacttgtgcttgctgacttgggaatgactcagcgaggcaggacagggctgggcaattcattcagaaacacccctcttmttccagagcccagccgtgagcctcggccctgcagccccggctccctccggggagtgactcttctctttgatgctgggaggagggaccacagagtctgggg

SEQ ID NO: 557162 - DNA, 201 bp, Homo sapiens
ctggacgtcgctcgggaaacacgctgcaaggtagggcctctcccgggcatctgaagtcacaggccctgcctctggcttttgcaggagaattactacaagcycctagcccaggacacctgtctgccctgcgactgcttcccccatggctcccacagccgcacttgcgacatggccaccgggcagtgtgcctgcaagcccggc

SEQ ID NO: 557163 - DNA, 201 bp, Homo sapiens
cacttatttgagttttacacaatgtctaggggtcaggaccaggcatcgggaccagacactggggcagggttggggtgggtgctggccgccgggggtgcttstctgaggctaagactaggtgggaccaacgggaggatgtgtgaggacccacctgcagcagcccgaggggatggcagtggtggggttacagagtgtggactt

SEQ ID NO: 557164 - DNA, 201 bp, Homo sapiens
gacgtcgctcgggaaacacgctgcaaggtagggcctctcccgggcatctgaagtcacaggccctgcctctggcttttgcaggagaattactacaagctccyagcccaggacacctgtctgccctgcgactgcttcccccatggctcccacagccgcacttgcgacatggccaccgggcagtgtgcctgcaagcccggcgtc

SEQ ID NO: 557165 - DNA, 201 bp, Homo sapiens
caacgctctgtggatgtgatcacagccggccacggggaatgactctggaccccgagggcatcatgggctgccctaaccaggcctcgaggggcgttggtgaygggagagtggaggagccccccaggctttggtgcatggggtggtgacggagactcacagtgaataagtggcccctggttcctgcccggcactggctgcgtc

SEQ ID NO: 557166 - DNA, 201 bp, Homo sapiens
gcattttcctggttgtgtgctgagtaactgcaagttgaatcctcactcgtcatgtggaatgttaggttagactctgggttgttaacaccctcgttgtaagtgtcatttcatgtgtttgtttcagcagcaggcaacctggtttaggttctgaccactggttctgtctctctttccacgagcagcaggtccaccaccaggtca

SEQ ID NO: 557167 - DNA, 201 bp, Homo sapiens
tgaaggtccgcgttgcccctcgacaccctgcaggttacagcgcggggacaggctgctgcactggcgtgcacgtgtgtgcatgcacgctgggtgtttggggraccctgggctccctcgtgttctgagttctcttgaccttctagaaacctggttctgcgtgagggggtgtgggtcagagcctggtcacccctctccagctct

SEQ ID NO: 557168 - DNA, 201 bp, Homo sapiens
ccgagtcaccttaccaggcacattcagcttctttgtgccttggtgtcctcacctgtcaagggccagcgatggttcctcgtggtgcgtgggtcctgtccacmcctctgcggacatttctccttcagccacccccgccgtcctgcaccgagagcccacgaggccggcagcagtcggaggttcacccaccccctgcctccgtgc

SEQ ID NO: 557169 - DNA, 201 bp, Homo sapiens
tgcattttcctggttgtgtgctgagtaactgcaagttgaatcctcactcgtcatgtggaatgttaggttagactctgggttgttaacaccctcgttgtaagtgtcatttcatgtgtttgtttcagcagcaggcaacctggtttaggttctgaccactggttctgtctctctttccacgagcagcaggtccaccaccaggtc

SEQ ID NO: 557170 - DNA, 201 bp, Homo sapiens
  misc_feature (1)...(201): n = A,T,C or G
tcaggctttgcacacctgctctccttccccaggaaatgcggtccgacactgcagcggggagaagggctggctgcccccagagctctttaactgtaccaccntctccttcgtggacctcagggccatggtaggggcgcctcggggatgtgtgttcagcaggggcacgtgtgtgttcgtgtatgcgtgagagagtttgtgtgg

SEQ ID NO: 557171 - DNA, 201 bp, Homo sapiens
cctcacctgtcaagggccagcgatggttcctcgtggtgcgtgggtcctgtccacccctctgcggacatttctccttcagccacccccgccgtcctgcaccragagcccacgaggccggcagcagtcggaggttcacccaccccctgcctccgtgcccgtgtctctccgctactctgcattcccggggttgactaacgtccc

SEQ ID NO: 557172 - DNA, 201 bp, Homo sapiens
gatggtcagacacatctcagccgatgtgctccatgtgccgggaaccctcccaggctctgcaggccccatcgcttgcagttttccagccgccacactgtggyatggaaagtaccgtcgccacctccatcctagagatgagcaaaccaaggacagggctcccagggcaccagcttgtgatggcagcagtgggatttgaacctg

SEQ ID NO: 557173 - DNA, 201 bp, Homo sapiens
ttgcattttcctggttgtgtgctgagtaactgcaagttgaatcctcactcgtcatgtggaatgttaggttagactctgggttgttaacaccctcgttgtaagtgtcatttcatgtgtttgtttcagcagcaggcaacctggtttaggttctgaccactggttctgtctctctttccacgagcagcaggtccaccaccaggt

SEQ ID NO: 557174 - DNA, 201 bp, Homo sapiens
tccagaatgagaagctgagccgcaatgagacgcaggtggacggcgccagggccctgcagctggtgagggcgctgcgcagtgctacacagcacacgggcacrctctttggcaatgacgtgcgcacggcctaccagctgctgggccacgtccttcagcacgagagctggcagcagggcttcgacctggcagccacgcaggacg

SEQ ID NO: 557175 - DNA, 201 bp, Homo sapiens
gcctggcgctgcctactctgacctggtgacccttcctgttgtgcccttccagccagctggggctggacaccagagctcaatgccccctggggtggtgcctyccaagggctgggccacaggggaccctggagacggtgccccatcgtcagggaagcatagggcataggtggcgcattttccttcctgcacgtatcagaagac

SEQ ID NO: 557176 - DNA, 201 bp, Homo sapiens
aaaaaatttctgtggggctacaaatacataaaacctaatgttaaacattaagctgggggaaattgccatgaaaatgacaatagttccttccataatttacraggagcttctataacacaataagagcaggaccaaaaacccagcagaaagacaaactcaggcagcttctaggaaagagagtgtcaattgtcaataaaacag

SEQ ID NO: 557177 - DNA, 201 bp, Homo sapiens
tatgaagcatctttaattctctagattttaatatactttgtgagcttagtaacatttttttattcctcttaagataaactttttgaaaaaatatttgggarctaggccaggcgtggtggctcacgcctgtaatcccagcactttgggaggccgaggcaggtgaatcacctgaggtcaggagttcaaaaccagcctggccaa

SEQ ID NO: 557178 - DNA, 201 bp, Homo sapiens
gctggcctctattccaagggctccaagtctgcttgggtcttaggtcctgtccctgtcctgtgattatagctaagctgagtcttgtccatctgaggccatcygaggccacttacctcatcaggagagagcctcccccgactgttaagggacaaagctgctgcagagggtgggcacggagaagggggggtgtcctggagttgc

SEQ ID NO: 557179 - DNA, 201 bp, Homo sapiens
tttcctggggctgccccataccagggagacacctccttccctcatctcaccctcttactcttcttctgccccctactctccctgccttccccactgttggycttcagcacatcaccccctggggtgtcccgtgatgcccgctgcccccaggggagtgtggcattgtgggggtgttggcgctgtcagccccactgactgccc

SEQ ID NO: 557180 - DNA, 201 bp, Homo sapiens
ctggttcccggatgagtccgtacctggctacgaggggaggaagggagcaaggtggatgatggctgggtggacaggtggacggacagatagatgggcggacrggcaggcaggtggacaggtggacgtgcagagagggagggaggaagggagcaggtggtggcgatgggcacaggcctgatcctgccctcccgcagctccctg

SEQ ID NO: 557181 - DNA, 201 bp, Homo sapiens
cgcatcatgacatcttggagaaggactcacctgtgtgccgggtccctggactgagcccctgcattgtgcatgggtactgccctgccgcacctgctaccctsttgacccccacagccatcccctcgtgaaacccctcctcccagctccctgaggccagccatcctcaggagccccacagaccccgccacctcactcccgtac

SEQ ID NO: 557182 - DNA, 201 bp, Homo sapiens
agccgagctcgggggcctcacggttgcaaggttggaatcggcccaagtggctgctgaaagcccctggcttcttgtgttgcgggacaggagacagcaggagytggatgaaggaagtagcaattaatttcaggaaaagctcaacaaatttgatgctggagaaaatactgatggctctcccgtgtccctgaaatccattttggc

SEQ ID NO: 557183 - DNA, 201 bp, Homo sapiens
aacccggttttgacaaccaagaggtcttcatcattgtcaggcccctgaggtcatgccctggatgagaaccactgggctagtgagacgggagctcagctagsgggagtcctggtagcttcaggtggagatgcgagaccctgggccggagcttgaggcagcagcctctacgtgggcagcaggtggtctccaaggggcactcgg

SEQ ID NO: 557184 - DNA, 201 bp, Homo sapiens
ctgcccgccccagctctgtagataaatgaggcatcacagatgaatgcctcgcaagggaccagagaggtctcagggttcccttaacccctacatacctttcygggctcctgtagccccagtgccgtttacttaatgcagggagtgaggatgggggggacgcccaccaacgtcgccaccctgaacatgaacaacgcactcaag

SEQ ID NO: 557185 - DNA, 201 bp, Homo sapiens
ctattgtccaggcttgagtgcagtggcgtaatcttcgctcactacaacctccgcctcctcggttcaagcgattcctctgcctcagcctcccgagtagctgkggttgcaggcacaggccaccacgcccagctaatttttgtatttttagtagagatggggtttcgccatgttggtcaggctggtcttgatctcctgacttca

SEQ ID NO: 557186 - DNA, 201 bp, Homo sapiens
tgtggctgaagcgggagggcattctgggagcgaaagcaacagagccaagctggagaggagtaaggggatgaggctgatctagagaggcctgggtggggacrgaggtgggcccgcaagccaggaacagaattcggctgtgtggaggccgtgggggcccagcactaaagtggcaggacctggtcttagggaacccccacctgc

SEQ ID NO: 557187 - DNA, 201 bp, Homo sapiens
gccgcacctgctaccctcttgacccccacagccatcccctcgtgaaacccctcctcccagctccctgaggccagccatcctcaggagccccacagacccckccacctcactcccgtactcactactcacttgagctgacagcagggtctcccccagcaccgctggcactgctgatgttcagggcctctgtgacgggacatc

SEQ ID NO: 557188 - DNA, 201 bp, Homo sapiens
atttaagcagtgcttgtacatctagtaaattaagctaagaatatgaagcatctttaattctctagattttaatatactttgtgagcttagtaacatttttytattcctcttaagataaactttttgaaaaaatatttgggaactaggccaggcgtggtggctcacgcctgtaatcccagcactttgggaggccgaggcagg

SEQ ID NO: 557189 - DNA, 201 bp, Homo sapiens
agtttatctggcccgtttcagaagcagcgtcagagagtcacagagtggcgaacgcaggagaatctgtgcgcgagaatctgtgttctagcatccatgcaagygagggaaaggcgtttcgtcgttagaaaaatgcaaaatgagtgattctcacccacacgtgagactggattcagcaccacagtgtggctcccgtctgctggg

SEQ ID NO: 557190 - DNA, 201 bp, Homo sapiens
atcccattttacagattagcaaagtaaggatctgagaggttatgtgatttttcccagagtctgcgagggcagggccctgtctgaagctgagacacaccttrtaacaccttgttatttggggcttcccatcagtaaaacgggagtcataatggggccctggcttctgggcagttcccataaaacattgtgcaatctgaagat

SEQ ID NO: 557191 - DNA, 201 bp, Homo sapiens
tacagttttagttacataatctttacagccagttaaaacctgtatcctgttttctctcatgaatttatcttagactgatgtgatatttagaagtagatttstaggttagcaagcatgtagcgttttcttttcttttttctttttcttttttttttgaaatggagtctcactctgtctcccaggttggagtgcagtggcgtg

SEQ ID NO: 557192 - DNA, 201 bp, Homo sapiens
taagtgctttgagatttccatgaccttgagatgaccgctaggtcctgctgtcattagggattgctcacctgttgcttgtcaggtcattcaaaacctcttgrgtctgtgctgcacattaaaccccagagtcccaaggagagtgggagatgtacccccggagcacccctggggtcgggggagcttctccgtttctgcacatgt

SEQ ID NO: 557193 - DNA, 201 bp, Homo sapiens
tcagctgcgctgctcttcacccacagccgccaatcacctgccaccgagtctcggaactgcggcactgtcccctgtcccctgagggctgcctgctccttgarggccatgatgtgacctctgcccccactgccccacagcatgagcccaccatggggaacacaattgcagataacctttatcttactgcagagtctttcacga

SEQ ID NO: 557194 - DNA, 201 bp, Homo sapiens
tttgcattttcctggttgtgtgctgagtaactgcaagttgaatcctcactcgtcatgtggaatgttaggttagactctgggttgttaacaccctcgttgtaagtgtcatttcatgtgtttgtttcagcagcaggcaacctggtttaggttctgaccactggttctgtctctctttccacgagcagcaggtccaccaccagg

SEQ ID NO: 557195 - DNA, 201 bp, Homo sapiens
gcccagctaatttttgtatttttagtagagacatggtttcaccaggtcgcccaggctggtcttgaactcctgacgtcgtgatccacccacctcggcctccyaaagtgctgtgattacaggtgtaagccaccacacctggccggaccacattgttttaatccgttaatctgtcggtggacgcaggtcacttccatgtttcag

SEQ ID NO: 557196 - DNA, 201 bp, Homo sapiens
cgttaatctgtcggtggacgcaggtcacttccatgtttcagctcttgtgaatagcgctgctatgaacataggtgtggttgactcatctttttcttttgttrcaaaaagtagcaacccaaacggtacatgctaatcgtaagacagctgagtaacacaaaatgagcagtaaagtagaaaggtggttcactccctgccacccca

SEQ ID NO: 557197 - DNA, 201 bp, Homo sapiens
gcagaccccctatcctggggacacgtctcaggcctctgggactctgaagccctggccagccccaaaatgctaggacctaaggtgctgggctctgcgtttgrtcagcattgtctccgcctgggaccactgccacccaccttgcagttgaggatactgagggtcccggaatgccaggggtgaagggggcggggtggagctggg

SEQ ID NO: 557198 - DNA, 201 bp, Homo sapiens
gaaaggaaaacacccccaaacccaagcccaggggccttttcctttatgtcttaattttccttccgctgcgctctgacttttctggggctgcgtgtgagccragatgaaggcggctctcgtccccccagcgtttaccgcagcgcctctcctgttggcaggggttgtcatggcgatgggccctccctgagccaagggggcacc

SEQ ID NO: 557199 - DNA, 201 bp, Homo sapiens
cttttgttacaaaaagtagcaacccaaacggtacatgctaatcgtaagacagctgagtaacacaaaatgagcagtaaagtagaaaggtggttcactccctsccaccccatccttttacatcctttgtaggagtcgctgcagcatccttccagagttttctttttcttttttttgagatggagtctcactctgtcgcccagg

SEQ ID NO: 557200 - DNA, 201 bp, Homo sapiens
atgaagcatctttaattctctagattttaatatactttgtgagcttagtaacatttttttattcctcttaagataaactttttgaaaaaatatttgggaastaggccaggcgtggtggctcacgcctgtaatcccagcactttgggaggccgaggcaggtgaatcacctgaggtcaggagttcaaaaccagcctggccaac

SEQ ID NO: 557201 - DNA, 201 bp, Homo sapiens
gcaacccaaacggtacatgctaatcgtaagacagctgagtaacacaaaatgagcagtaaagtagaaaggtggttcactccctgccaccccatccttttacrtcctttgtaggagtcgctgcagcatccttccagagttttctttttcttttttttgagatggagtctcactctgtcgcccaggctggagtgcagtggcgtg

SEQ ID NO: 557202 - DNA, 201 bp, Homo sapiens
taattctctagattttaatatactttgtgagcttagtaacatttttttattcctcttaagataaactttttgaaaaaatatttgggaactaggccaggcgyggtggctcacgcctgtaatcccagcactttgggaggccgaggcaggtgaatcacctgaggtcaggagttcaaaaccagcctggccaacatggtgaagccc

SEQ ID NO: 557203 - DNA, 201 bp, Homo sapiens
tggcgctgtcagccccactgactgccctgagcttctcaagtcctgggatccacagctctctgagctttgggtgcctggcccgaagtcaaggcctagtcagygtttgttgaaggaatgaacgacagcgtgccaaagaagctcagcacagtcactatcgtgttatgaaatagagcagaaggaaagtctgctccacgccatgct

SEQ ID NO: 557204 - DNA, 201 bp, Homo sapiens
gatctcactctattgtccaggcttgagtgcagtggcgtaatcttcgctcactacaacctccgcctcctcggttcaagcgattcctctgcctcagcctcccragtagctggggttgcaggcacaggccaccacgcccagctaatttttgtatttttagtagagatggggtttcgccatgttggtcaggctggtcttgatctc

SEQ ID NO: 557205 - DNA, 201 bp, Homo sapiens
ggaggccgaggtgggtggatcacttgaagccaggagttcaagaccagccaggcaacatggtgaaaccccatctctacgaaaaaaaaaaaaaaaaaaaaaaaagcaaaaattagccaggcatggtggcacgcatctgtagtcctagctacgtgggaggctgaggtgggaggatcacttgagcttcttaggcaaaggttccag

SEQ ID NO: 557206 - DNA, 201 bp, Homo sapiens
tttttgtatttttagtagagatggggtttcgccatgttggtcaggctggtcttgatctcctgacttcaagtgatccacccgcctcagcctcccagagagcwgggattacaggcgtgagccaccgtgtccggccagcaatggcactttcttagccagctcggggcttccctgaccgtagcccacggcttactcactttccct

SEQ ID NO: 557207 - DNA, 201 bp, Homo sapiens
gggaggccgaggtgggtggatcacttgaagccaggagttcaagaccagccaggcaacatggtgaaaccccatctctacgaaaaaaaaaaaaaaaaaaaaaaaagcaaaaattagccaggcatggtggcacgcatctgtagtcctagctacgtgggaggctgaggtgggaggatcacttgagcttcttaggcaaaggttcca

SEQ ID NO: 557208 - DNA, 201 bp, Homo sapiens
tttcgccatgttggtcaggctggtcttgatctcctgacttcaagtgatccacccgcctcagcctcccagagagctgggattacaggcgtgagccaccgtgyccggccagcaatggcactttcttagccagctcggggcttccctgaccgtagcccacggcttactcactttccctgcccgacttaactgcctgctttagga

SEQ ID NO: 557209 - DNA, 201 bp, Homo sapiens
agcgattgatcctttttcccgtagaataagacaagcaattctgatcagtgttaaaggcaacagcaacaaagaacaactttgcctatactttttttttttttgagacaggttctcactctgtcacccaagtcgaagtacagtagtgctacctaggctcactgcaacctctgcctcctgggcttgagtgatccttccacctca

SEQ ID NO: 557210 - DNA, 201 bp, Homo sapiens
gctccacctcctgggttcatgccattctcctgcctcagcctcccaaatagctgggactacaggcgcccactaccacgcctggctattttttttttttttttgtatttttagtagacacggggtttcaccgtgttagccaggatggcctcgatctcctgaccttgtgatccacccgcctcagcctcccaaagtgctgggatt

SEQ ID NO: 557211 - DNA, 201 bp, Homo sapiens
ctcccagagagctgggattacaggcgtgagccaccgtgtccggccagcaatggcactttcttagccagctcggggcttccctgaccgtagcccacggcttmctcactttccctgcccgacttaactgcctgctttaggagaacagtaggacaaggttacagggtgagatccacttaaaagaaaacctaaacgcatgaaatg

SEQ ID NO: 557212 - DNA, 201 bp, Homo sapiens
gatataacatcacttttatcactgatctgctcactttggagttctttaagcaagaacaatgcaagagatggcaaaggaattttttttttttttttttttttgagacggagtctcgctctgtcacccaggctggagtgcagtggcatgatctcagcccattgcaagctctgtctcccaggttcacgccattctcctgcctca

SEQ ID NO: 557213 - DNA, 201 bp, Homo sapiens
gggcttccctgaccgtagcccacggcttactcactttccctgcccgacttaactgcctgctttaggagaacagtaggacaaggttacagggtgagatccasttaaaagaaaacctaaacgcatgaaatgacatgagttgcttttaagtggccctcaggtgaaagtactttattccagattgcaggcttaattggttagcgt

SEQ ID NO: 557214 - DNA, 201 bp, Homo sapiens
tcactgcaacttctgccccccaggttcaagcgattctcctgcctcagcctccattgtagttgggattacaggagctcaccaccacacctggctaaatttgytgtatttttagtagagacagggttttgctatgttgaccaggctggtctcgaactcctgacctcaggtgatccactcgcctccgcctcccaaagtgctggg

SEQ ID NO: 557215 - DNA, 201 bp, Homo sapiens
gcaagactccgtctcaaaaaaaaaaagggcagggctgtggcacgggagtggtcactgctgtgccgtagaaactgctgcttctggggactttccactgtggygcggggggtgcgtttgttctttttgtgtccctcagctaggcctgtggggcttccctctggcctgtgccgagtccagccttggtgtgggttcaagccgtgt

SEQ ID NO: 557216 - DNA, 201 bp, Homo sapiens
gacctgaggcagggccggttgggctggactcttgctggactgtgatacacaaagggaggcctagtgtgaggcctgcaggggttgagcccaagtctgagatytgggaaactgaggggctcagtaagtctgaggagggaggtggggcctccccaaaccccaacagggcctgcggggctctgctgctcccccaggccaggcacg

SEQ ID NO: 557217 - DNA, 201 bp, Homo sapiens
atttctggaatgagccggaggggaccctcggaggggtgaggggagggggctgcctgccaggtggagggcccagtgcctttacttggggtacaaggggagcygcgcagaagcacggacagcccccaggagccgttttcgtttcctcccacacgtgctgagggactcgccctggtgaagggatgggcatttttcaggaaaaca

SEQ ID NO: 557218 - DNA, 201 bp, Homo sapiens
aagatttttgaatttgtacttctgcggtgctggtttttctccacaaacacccccgcccctccccatgcccagggtggccgtggaagggacggtttacggaygtgcagctgagctgtccgtgtcccatgctccctcagccagtggaacgtgccggaactttttgtccattccctagtaggcctgccacagcctagatgggca

SEQ ID NO: 557219 - DNA, 201 bp, Homo sapiens
tcgctgtgttgcccaggctggtttcaaactcctgggctcaaacaattttcccacctcagccttccaaagtgctgggattatgagtgtgagccaccgcgccyggtttgcaagttgctttttaaggatgtttgattgcagaccttgcgttctagcaaatgaagacctgccttgctcttttttttttttttttttttttttgag

SEQ ID NO: 557220 - DNA, 201 bp, Homo sapiens
ccagagaggtctcagggttcccttaacccctacatacctttccgggctcctgtagccccagtgccgtttacttaatgcagggagtgaggatgggggggacscccaccaacgtcgccaccctgaacatgaacaacgcactcaaggtcagggtgaaggacggctgtgatgtggacgacccctgtacctcgagcccctgtcccc

SEQ ID NO: 557221 - DNA, 201 bp, Homo sapiens
gtttgcagacggtggaggggttttatgtctgacagatgagaaggatccagaagagggccatcccgggccagcgcctaatggcttggggttctgagggacgmgagcagaggatgctgggagatggtgtcccaagggtgggggaccaggagcacgcgggaagctgcctcgatacagtttgagaaaattctgcaaaatctcccg

SEQ ID NO: 557222 - DNA, 201 bp, Homo sapiens
ccgacttcttcagaccacctgaagaaaaaggtaaaaccgcttagaaacctgctgctgccctcggagtccccagcgttcagggaggggagggccccgctgcsggcatcgcaggacctgcgcactgaagatctgggccagagtgttccgagtgctctctggtgccaggtcctgttggtgacagcaggttgttttgttcaagtg

SEQ ID NO: 557223 - DNA, 201 bp, Homo sapiens
gtttgatattatactatctttttgcagggtgtttccatggatggaaactgtaaggggtacatgggatatctctgtattattgttttacaattgcatgtacmtctaaaattgtctcaaaatagaaagtttcatcaaaataactttcaggccaggtgtggtggctcacgcctgtaaccccagcactttgggaggctaaggtgg

SEQ ID NO: 557224 - DNA, 201 bp, Homo sapiens
atgtgagtgtgaatgtggatgagtatgcacgagtgtgggtaggtgtgcacatgtgagtatgagcgcacgtgtgggtgagtgcacatttgagtgtgagtgtsggtaagtgcacgtgggttttgagtatgcacatgattgtgggtgagtgtacataagggtgagtgcacgtgtgcgtgggtgagtgtgcatgagtttgggtaa

SEQ ID NO: 557225 - DNA, 201 bp, Homo sapiens
gatgggcggacgggcaggcaggtggacaggtggacgtgcagagagggagggaggaagggagcaggtggtggcgatgggcacaggcctgatcctgccctccygcagctccctgctgaggaccgcattcctcctgctgctgctcatcagcgccacctggctgctggggctgctggctgtgaaccgcgatgcactgagctttca

SEQ ID NO: 557226 - DNA, 201 bp, Homo sapiens
gcccaggctggtcttgaactcctgacgtcgtgatccacccacctcggcctcccaaagtgctgtgattacaggtgtaagccaccacacctggccggaccacrttgttttaatccgttaatctgtcggtggacgcaggtcacttccatgtttcagctcttgtgaatagcgctgctatgaacataggtgtggttgactcatctt

SEQ ID NO: 557227 - DNA, 201 bp, Homo sapiens
cctaaggcctccccacattgatcttggctcctaagattttatggttgagaatattgcttgaaatactcaagttgcaacttgaagtgtgttggattgcctcmcttttagtgtacatgtttttgtgtgactgcattggacttcttggtatggtcaggtatgtgggctggtttaagtgtcctgtaaaactcaggaccccacgtg

SEQ ID NO: 557228 - DNA, 201 bp, Homo sapiens
ctagcgtggcactggcccgtctcaggggctttgggagtgggcagtgtcaggtcttcctcattgtctcccaaagggctactgtggccaagcttcgtagacgkgtttgccaggacagtaacttctgcctctctctgagtcatcagacctggagggaatggaggagcaggaggcggacgggaaaaaggggcctgggagaatgga

SEQ ID NO: 557229 - DNA, 201 bp, Homo sapiens
acctttagggttcagccctaccaggcctgcaggttggggagaggtgggtcagagccaccagacccatggctctcaagggagcagctcgagtggcagtgccrctgcctgctgagcaccgctctcgtgcctcaggggacgctgtggccaaccacgttccggccggctggcccgaccagagcctggctgagagtgacagtgagg

SEQ ID NO: 557230 - DNA, 201 bp, Homo sapiens
ctccatctcaaaaagccacagccaggtggtggttggcaccaatgcacgtccactttctctgggagcttgagatgcctcagcccagaaatgcctaaagcccygctctgtcgctgtctgcctgttttctctgtcttattgatctttactgtttcgtttatttgaaacaaaagtttatttgttggataaaaattccgaacagct

SEQ ID NO: 557231 - DNA, 201 bp, Homo sapiens
cctttagggttcagccctaccaggcctgcaggttggggagaggtgggtcagagccaccagacccatggctctcaagggagcagctcgagtggcagtgccgytgcctgctgagcaccgctctcgtgcctcaggggacgctgtggccaaccacgttccggccggctggcccgaccagagcctggctgagagtgacagtgagga

SEQ ID NO: 557232 - DNA, 201 bp, Homo sapiens
tgagagtgacagtgaggaccccagcggcaagccccgcctgaaggtggagaccaaggtcagcgtggagctgcaccgcgaggagcagggcagtcaccgtggasagtaccccccggaccaggagagcgggggcgcagccaggcttgctagcagccagcccccagagcagaggaaaggtgcctggggaggccggggctgcagtga

SEQ ID NO: 557233 - DNA, 201 bp, Homo sapiens
ccaccggagtgttgttttttctttttcttttttttttttttgagacagagtctcactctgtccccagggtacagtggagtgggacaatctcagctcactayaacctccgcctcctggattcaagtgactctcctgcctcagcctcctgagtacctgggattacaggccccctgccaccacgcccggctaatttttttgtat

SEQ ID NO: 557234 - DNA, 201 bp, Homo sapiens
gtccgcatgagaccatctgcgtccagcacccaggagggtcccgcacaggcaggctgggtgtggtgggcgctgtggggcagtgggtggacaggtgtgcttcrccccacaggccagggttcgggtcctcctcacccagccacccctccctgacagggcgaagggcctcaggcgcttttggcagttggaggtctgcagtgacga

SEQ ID NO: 557235 - DNA, 201 bp, Homo sapiens
tgaacctgggaggtagaggttgcagtgagccaagaccgtgccactgcactctagcctgggcgacagagtgagactctgtctcaaaaataaaacaaaaaaaataaacaaaaagataattggatatacagaatatgtaagataaagaagctaaacttttacaaagttaattaagccttgcaaagtatgtaaaatccttatgat

SEQ ID NO: 557236 - DNA, 201 bp, Homo sapiens
ttagcgtaaaacagtggaaccaggtggaaaccattgagccattaatcatttgggtcttgaaatcctgttttttcatgcctccctgtcaccgtagaaatttygtgactcatcctcccgcctctgaagatgctctttccttgatacctcctgactcatcaccaagatgaattactccaaatgtagccaacggtggtttttaaa

SEQ ID NO: 557237 - DNA, 201 bp, Homo sapiens
gaatctcttgaacctgggaggtagaggttgcagtgagccaagaccgtgccactgcactctagcctgggcgacagagtgagactctgtctcaaaaataaaayaaaaaaaataaacaaaaagataattggatatacagaatatgtaagataaagaagctaaacttttacaaagttaattaagccttgcaaagtatgtaaaatc

SEQ ID NO: 557238 - DNA, 201 bp, Homo sapiens
gcaggagaatctcttgaacctgggaggtagaggttgcagtgagccaagaccgtgccactgcactctagcctgggcgacagagtgagactctgtctcaaaartaaaacaaaaaaaataaacaaaaagataattggatatacagaatatgtaagataaagaagctaaacttttacaaagttaattaagccttgcaaagtatgt

SEQ ID NO: 557239 - DNA, 201 bp, Homo sapiens
ctgagcaatcgttagctgctcgttaccagcacatagcacaagtttatcgagcttataacaagggtttgaggtattagcaggtatttatcaggcaggaagakcgcaggggagcagagagagagaggaaggatggcttccaaggttctctgcatcagaagtggagggaaaaccaccagcacgggtgttggcagcctgatgcaa

SEQ ID NO: 557240 - DNA, 201 bp, Homo sapiens
ccctgtgtgtctgagtgtgtcttatggctggaggagagcaggacccatgcactccaggtagaagtgccatgtcgacatgtgtacactttgcacttgggaaygttggttctcagaaagcggctcactgggtctctgtgcagccctgtggggtggccacgttaggtgttcccactgcaggggcggatgctgagatggccagga

SEQ ID NO: 557241 - DNA, 201 bp, Homo sapiens
ggcaggcagaggcggcgggagacccccgcctcccacagcccacacctgcgttgggtttgggggtggggacgactccaggtatgagcaggcctgaaccaggycccctcctctgctctttcagtggattcctgttctgtgtcagcttccccaggtccccttcctcccctttgcccctcacggccttgagtgggctgctctgcc

SEQ ID NO: 557242 - DNA, 201 bp, Homo sapiens
tttttttttgagaaggagtcttgatctgtcaccaggctggagtgcagtggcgcaattttggctcactgcaacctctgtctcccgggttcaagcaattctcrtgcctcagcctcccgagtagctgggattacagatgtgcaccaccacgccccgctagagatggggtttcaccatgttggccaggctggtctcaaactcctg

SEQ ID NO: 557243 - DNA, 201 bp, Homo sapiens
tcttttaaaaaaaatatatcgacaaggccattaaacatgttattccagttgttagaaaagaacatttctccagactgccaacaggtatatctgtgtttttytggcacacatgacttttttttttgtttttgttcttcttttgagacaaagtcttactctttcacccaggctggagtgcagtggtgcaatattggctcactg

SEQ ID NO: 557244 - DNA, 201 bp, Homo sapiens
cacggtatgtgtgtctgcatgcatgtgtatagggtatgtacatgtgtatggcatgtgcacgtggttggatgtggtatgggggtatatgcgttcctcacccrctcacatatggccctgtaggtgacgccgtcctccatctgttttggagcctcatcccttgcaccttgggtccatcatggcctcctgacctctacatggccc

SEQ ID NO: 557245 - DNA, 201 bp, Homo sapiens
gggggtggggacgactccaggtatgagcaggcctgaaccaggtcccctcctctgctctttcagtggattcctgttctgtgtcagcttccccaggtcccctycctcccctttgcccctcacggccttgagtgggctgctctgcctctctgaagggccagcttggatgtagcagtggccagcacggtcagcgccccttccccg

SEQ ID NO: 557246 - DNA, 201 bp, Homo sapiens
caattctcatgcctcagcctcccgagtagctgggattacagatgtgcaccaccacgccccgctagagatggggtttcaccatgttggccaggctggtctcraactcctgacctcaggtgatccacctgtctcggcctcccaaagtgctgggattacaggtatgagccaccgtgcacggccaaagatgggcgttttcctggc

SEQ ID NO: 557247 - DNA, 201 bp, Homo sapiens
agtgtgctgtgtgggtattcttctttgtgtttgtcgtcatttcttgcttgcattctaaagagagggggtttgggcgacagttgggaaccatcagttttttytttttttttgagacggagtcttgctttgttgccaggctggagtgcagtggtggtatgatctcggctcactgcaacttccgcctcccaggttcaagcaatt

SEQ ID NO: 557248 - DNA, 201 bp, Homo sapiens
cttgcctctccacagggtatctcacgggagctagtgcagccatgggcatggctcaggccccttggcctggtgtagtcctcacagctcctgttttctcattkgcttcctaatgtattccaccaccacccccactaacacgagctctgtctggttcccggatgagtccgtacctggctacgaggggaggaagggagcaaggtg

SEQ ID NO: 557249 - DNA, 201 bp, Homo sapiens
gcccctcacggccttgagtgggctgctctgcctctctgaagggccagcttggatgtagcagtggccagcacggtcagcgccccttccccgagccagtgccygccatgtggcctgggtggggggcgcttcgtcgacttccctgcttcagatgaagaagccgtggccgcgggtccctggaaaggggcctgttacgctcccaag

SEQ ID NO: 557250 - DNA, 201 bp, Homo sapiens
tggaaaaaaagtctttgtagatataactaaattaaggatttttgagatgggatcatcctggattaggggccctaactccaatggcaagtccttctaaaagwagagagcaggagaatacacagacatagagcacagagaatgtgtgaagaccagagagtaggatgatgtagccccaacccaaggaactcctctggctactac

SEQ ID NO: 557251 - DNA, 201 bp, Homo sapiens
ggctacgaggggaggaagggagcaaggtggatgatggctgggtggacaggtggacggacagatagatgggcggacgggcaggcaggtggacaggtggacgygcagagagggagggaggaagggagcaggtggtggcgatgggcacaggcctgatcctgccctcccgcagctccctgctgaggaccgcattcctcctgctgc

SEQ ID NO: 557252 - DNA, 201 bp, Homo sapiens
aagggcccatcgtggagccatcccactctggggactccagcgaggtctgggctccaggaagatgctgccatttgaagggtatgctgggttatgcactgagyatcctcacattggatgtccccccagttccatctttatagcagtctctcttttttttttttttttgaaatgaagtctcgctctggcacctaggctggagtg

SEQ ID NO: 557253 - DNA, 201 bp, Homo sapiens
acacacccggttaatttttttttttttgtatttttagtagcgatggggtttcaccgtgttagccaggatggtcttgatctccagatctcatgatcctcccrccttggcctcccaaaatgctgggattacaggcgtgagccaccgcgccaggcccagttacacattcttaggtgttgcaacctggtaatgaagagtgggaga

SEQ ID NO: 557254 - DNA, 201 bp, Homo sapiens
gaagggccagcttggatgtagcagtggccagcacggtcagcgccccttccccgagccagtgcctgccatgtggcctgggtggggggcgcttcgtcgacttycctgcttcagatgaagaagccgtggccgcgggtccctggaaaggggcctgttacgctcccaagagttggcaaggacgccatctttactccgcagatagta

SEQ ID NO: 557255 - DNA, 201 bp, Homo sapiens
catctgaggccatccgaggccacttacctcatcaggagagagcctcccccgactgttaagggacaaagctgctgcagagggtgggcacggagaaggggggstgtcctggagttgcccatggagtgggcacttccaactcgagcctttgatcttctctccgagtgccgtggcctgcggggacctgctcccggggtgcacact

SEQ ID NO: 557256 - DNA, 201 bp, Homo sapiens
tggtggcgatgggcacaggcctgatcctgccctcccgcagctccctgctgaggaccgcattcctcctgctgctgctcatcagcgccacctggctgctgggkctgctggctgtgaaccgcgatgcactgagctttcactacctcttcgccatcttcagcggcttacaggtaggtgacggccgagttgcccgcgggacccctg

SEQ ID NO: 557257 - DNA, 201 bp, Homo sapiens
gaggccatgagggctggatgggccttggctcctgggagcttttcttttgccgttaagaatgcttttctggccgggtgtggtggctcgcacctgtaatcccrgcactttgggaggctaaggcgagcagatcacctgaggtcaggagttcgagaccagcctggccaacatggtgaaaccccgtctctacttaaaatacaaaaa

SEQ ID NO: 557258 - DNA, 201 bp, Homo sapiens
cctgttacgctcccaagagttggcaaggacgccatctttactccgcagatagtacctactgtataccaggccagcgcacacagccagacctcccccagccygttctggggggtgaccaagttcatctgtgccgttggctttttcatgggtagaggggactgtgcaagcaccccccacctctggctttgtcagatgagtcag

SEQ ID NO: 557259 - DNA, 201 bp, Homo sapiens
gctgctgcagagggtgggcacggagaagggggggtgtcctggagttgcccatggagtgggcacttccaactcgagcctttgatcttctctccgagtgccgkggcctgcggggacctgctcccggggtgcacactcttgtgcagcttgctgtctcccgggaattatgttaaggtcagcagtggctgtaccacctcttacgga

SEQ ID NO: 557260 - DNA, 201 bp, Homo sapiens
tgatcctgccctcccgcagctccctgctgaggaccgcattcctcctgctgctgctcatcagcgccacctggctgctggggctgctggctgtgaaccgcgaygcactgagctttcactacctcttcgccatcttcagcggcttacaggtaggtgacggccgagttgcccgcgggacccctgcctggccgccgtgacaccatc

SEQ ID NO: 557261 - DNA, 201 bp, Homo sapiens
tggcggggcaggtgcatgaggccatgagggctggatgggccttggctcctgggagcttttcttttgccgttaagaatgcttttctggccgggtgtggtggytcgcacctgtaatcccggcactttgggaggctaaggcgagcagatcacctgaggtcaggagttcgagaccagcctggccaacatggtgaaaccccgtctc

SEQ ID NO: 557262 - DNA, 201 bp, Homo sapiens
ggactgtgcaagcaccccccacctctggctttgtcagatgagtcaggagccctagggtaacgtctaacgtggctttgagacctgcatcggccttccaggcygccagtccaggctgcaggaagcttggggctgcactgggcaggggtggtcgaggcccctggggacccctgggccagcagatcccctctgaagatgattgac

SEQ ID NO: 557263 - DNA, 201 bp, Homo sapiens
ctggccgccgtgacaccatcgctgtgatgcgaagcagtggaggcctctgcggtcccaaaccagccctgcctgggtcccgcgtgggggcctcctgtggctgygaggactcagtcccttgtgcagccggcacgggggctggtgcctcctccccactgtgtctggggacgatgaccctagtgccaggccagcacaagtccactt

SEQ ID NO: 557264 - DNA, 201 bp, Homo sapiens
gtggagaaggaggttgtagggagcccctcttctgaaaggctgtgtccccgagggtgattccaggctggggtcgcctgggcccgcatgctactggagccttyggcttggagctgctgcaagcaccagaagacggtcaaacatgcacccatccttcaggttcggcagggtttccagccctcagcgtgtaggtgactcccgtaa

SEQ ID NO: 557265 - DNA, 201 bp, Homo sapiens
catcctaggttttttttgttttgttttgttttgtttttttgagataaagttttgctcttgttgcccaggctggagtgcgacggcgtaacctcagctcactkcaacttctgccccccaggttcaagcgattctcctgcctcagcctccattgtagttgggattacaggagctcaccaccacacctggctaaatttgctgtat

SEQ ID NO: 557266 - DNA, 201 bp, Homo sapiens
ccccacctggcctccagatagcagcagtccctgaggaggggaggcctggccgtgtcctgggccgtgtggccggacatgttgtgtgcactcaaggctgtatscgcatctgtgctggggcgcctaagggcaggtgcctagggaggcagcagcaggtgctgaccccaccttcctccctccagggccccttcgtcctccttttcc

SEQ ID NO: 557267 - DNA, 201 bp, Homo sapiens
ccctgaaatgccaccttttatcataaacctcattccacagccacaggagaggaagcgtctgtcacctccctgtccatgtttatttctatcccataccaccrgagtgttgttttttctttttcttttttttttttttgagacagagtctcactctgtccccagggtacagtggagtgggacaatctcagctcactacaacct

SEQ ID NO: 557268 - DNA, 201 bp, Homo sapiens
tgctgacagccatcttcggtcccctctgtctgtcagtggcgaggccctggggcacagagctggaggtttctgaggacggaagctcagtgcaagtgactgcrttgcctgaaacgggacggctgagagttacctgcacatggtgcctgattgtgggggtgggcgacagtggcagccgtgctgcaggactgtgggaggggctga

SEQ ID NO: 557269 - DNA, 201 bp, Homo sapiens
accatagtctaggtgtgtagtaggctgtaccagctgggtctagctaggtttgtctaaggacactctgtgatgttcacccaacgatgaagtcatctaacaaygcatttctcagaatgttttccccagtctttaagtgatgcacgattgtactgtttttaaaaatgtgtttctgtgtgctggcaataaatgaaaagtgaaata

SEQ ID NO: 557270 - DNA, 201 bp, Homo sapiens
cttcagcgcacagagatgctgcccttaggttagcctcctctcctgccttggggtcggccacacgggaacactcaccctgttctcccaggatgacccccccyccccgctcctgcggtcaggaagtccctcccaaagcggcgtctgggctgcgtgtcctccgccatcagctgtgtgccgtggcggagccatgccttattgcct

SEQ ID NO: 557271 - DNA, 201 bp, Homo sapiens
cctgttgaggggccttccagctcagagaagctgcattgtactagccggggagtcgcctttctcctgccctgtattcttccctccctccctccttccaactrtccatccacccatcaagatttttctttctttttattttatttatttatttatttatttatttatttatttgagacagagtctcactctggcacccaggct

SEQ ID NO: 557272 - DNA, 201 bp, Homo sapiens
tcctagtctctcctccatcgtcggtgttgtggagaaggaggttgtagggagcccctcttctgaaaggctgtgtccccgagggtgattccaggctggggtcrcctgggcccgcatgctactggagcctttggcttggagctgctgcaagcaccagaagacggtcaaacatgcacccatccttcaggttcggcagggtttcca

SEQ ID NO: 557273 - DNA, 201 bp, Homo sapiens
aatccaggagcagctcctgccacctgggccagtgagcctgagaccctacacggagagactgtgcttggaggggccctgggctggctccctggactccttgstccttcctctgagaagggagatgctgagtcccccatttcaccccaccctggctggtccttggcatggggtggccactgggcacgtggccctcacccttcc

SEQ ID NO: 557274 - DNA, 201 bp, Homo sapiens
gctgcctcccccggccatccagggcttccctgactgtcctcagtggtcctggttaactggctcctccagagggcagtgggaagtgctggagggtgttaaasaggagggagctgggatctcttcaatatttaaataaggagagtggggaggagcatagcctaggccagggtggggcaaggggcacagaaagaccaggtctca

SEQ ID NO: 557275 - DNA, 201 bp, Homo sapiens
aacctgaacacacgggttcatataaatgccccaaattccctagaatgaaattccttaatgctgggaggggttgtagtaaacaaccctcttttttttttttttgagacagagttttgcttttgttgcccaggctggagtgcaatggtgcgatctcagctcactgcaacctctgtcccctgggttcaagcgattgtcctgcct

SEQ ID NO: 557276 - DNA, 201 bp, Homo sapiens
attacaggcgtgagccaccgcgtctggcctcattcttttttatagtggaatagtacaccatggtatatatgtaccacatttcttttctccagtcatctgtkgccgggccacgtcatttttaattcactttgagtgtgtgtccgtgggtgcagggctgtaggcctcttgttgcagaatgcggagcttgggagaaaggcgatg

SEQ ID NO: 557277 - DNA, 201 bp, Homo sapiens
cccaggctggagtgcagtggcgcgatctcagctcactgcaagctccgcctcccgggttcacgccgttctcctgcctcagcctcccgagtagctgggactayaggcgcccgccaccacgcccggctgatttttttgtatttttagtagagacagggtttcaccgtgttaaccaggatggcctcgatctcctgacctcgtgat

SEQ ID NO: 557278 - DNA, 201 bp, Homo sapiens
ctggcctcccccttcccagctccctccttgtggggcgggggtctgggcctcctgctgagggctttcctggctaccttgccaggtggggcagggctgggcckcctgtaggtgtgactcaggagggattccaggtgcagagcaagtcaccaggaggtgagaaagtcaaacaatgcgtgaaacccaagggcagacgtgggtgct

SEQ ID NO: 557279 - DNA, 201 bp, Homo sapiens
ggtaacattcccagattttaggaattactatgtggacacttccttttgggggccaccgtgtagcccattacagggtgggttatttcctagtctctcctccrtcgtcggtgttgtggagaaggaggttgtagggagcccctcttctgaaaggctgtgtccccgagggtgattccaggctggggtcgcctgggcccgcatgct

SEQ ID NO: 557280 - DNA, 201 bp, Homo sapiens
cggccttccaggccgccagtccaggctgcaggaagcttggggctgcactgggcaggggtggtcgaggcccctggggacccctgggccagcagatcccctckgaagatgattgacccattggggggaacccaccttctgagcttctcaggttttcttttcatcgggagagtcatttttagaaaactaatgactggggaacgg

SEQ ID NO: 557281 - DNA, 201 bp, Homo sapiens
ttttattttattttgagacagagtctcgctctgtcgcccaggctggagtgcagtggcgcgatctcagctcactgcaagctccgcctcccgggttcacgccrttctcctgcctcagcctcccgagtagctgggactataggcgcccgccaccacgcccggctgatttttttgtatttttagtagagacagggtttcaccgtg

SEQ ID NO: 557282 - DNA, 201 bp, Homo sapiens
ctgcctggctccaggctctgcctccctgtgcaccagcccttccccttgcttctcatctccctctgcgctcattttacgataattcatgttgtgattgcatygagcccacctgctaatcggattgcctcatctcaagatccttaacttaattgcacttttgccatataagtaaaattccttcttttgctatataaggtaaca

SEQ ID NO: 557283 - DNA, 201 bp, Homo sapiens
tgcgtggaggtaattgagctcatttattcacgatgaaagtggtgctgtcggcagaggggttttattacttgctccctggtaagccgagctcgggggcctcrcggttgcaaggttggaatcggcccaagtggctgctgaaagcccctggcttcttgtgttgcgggacaggagacagcaggagctggatgaaggaagtagcaa

SEQ ID NO: 557284 - DNA, 201 bp, Homo sapiens
gctctgcagctgggaaaactgaggcagtgggggatggggaggtggtttgtatacctcaggggaatgatccattggggtgagaacctgccctggccagagcyagaccctctggattcttcccccagagtcaccagcctcaggaagtggatgagcccagctcatcccttatgggtgataaaggttcctttgctttaaaacacg

SEQ ID NO: 557285 - DNA, 201 bp, Homo sapiens
cgactcgcccatcaacgccaacttgcgttaccgcgtgttggggggcgcgtgggacgtcttccagctcaacgagagctctggcgtggtgagtacacgggcgytgctggaccgggaggaggcggccgagtaccagctgctggtggaggccaacgaccaggggcgcaatccgggcccgctcagtgccacggccaccgtgtacat

SEQ ID NO: 557286 - DNA, 201 bp, Homo sapiens
cactgataataaagacatacctgagactaggtaatatataaagaaaaatggtttaattgactcacagtcccacatggctggggaggcctcacaatcatggkggaaagcaaaggaggatcaaagtcacatcttacatggtggcaggcaagagaaagcttgtgcaggggaactcctctataaaaacgtcagatctcatgagac

SEQ ID NO: 557287 - DNA, 201 bp, Homo sapiens
acgtcactccagctgtgagttttattttgggttctcttttttttttttttttttttttttttagacagagtctcgctctgtcgcccaggctgaagtgcagyggcacaatctcggctcactgcaagctctgcctcccaggttcacgccattctcctgcctcagcctcccgagtagctgggactacaggtgcccaccaccacg

SEQ ID NO: 557288 - DNA, 201 bp, Homo sapiens
tgcctttgtattacagttgcttacagtactcagtacagtaacatgctgtacaggtgtgtagcctggaagcagttggttataccacagcctaggtgtgtagyaggctgtaccagccatgtctaagcctagaagcagtcagttatactacagtctaggtgtgcagtaggctgtaccagctgggtctaagcctaggagcagtcg

SEQ ID NO: 557289 - DNA, 201 bp, Homo sapiens
ggccttcgggacacacactggcctctctcaccgtggtgcttgcccctccagcgcaccttcccccaggtcttccctgaatgttccctccctgtccccactcygtcctccctgcagccctcacccccatggtggtgtttgcttgtcattgtcaccttcctccctctgcactagatgcagacagcagcgtcctccgcccaacag

SEQ ID NO: 557290 - DNA, 201 bp, Homo sapiens
accatgttagccaggatggtcttgatctcctgatctcaggtgatccacccgccttggcttcccaaagttctgggattacaggcatgagccaccacgccccrcctgtttttattttttgagtcagggtctttttctgctgcccaggctggagtgcagtggtgccatcatggctcattgcagcctccaactcctgggctcaac

SEQ ID NO: 557291 - DNA, 201 bp, Homo sapiens
aagacccactgcctccccacacaccgggagggagtgccgggaaggggagacgccatgcaggagtcaggcttgaatctgcggagcgttgtgcatctggggaygtctgtgcagcaggaacgctgcccccatcacagttgccctgggcacagtgaggagccgtgagtgggggctgtgctgggggtggcgctatggtgagcgagc

SEQ ID NO: 557292 - DNA, 201 bp, Homo sapiens
tggccttcgggacacacactggcctctctcaccgtggtgcttgcccctccagcgcaccttcccccaggtcttccctgaatgttccctccctgtccccactctgtcctccctgcagccctcacccccatggtggtgtttgcttgtcattgtcaccttcctccctctgcactagatgcagacagcagcgtcctccgcccaaca

SEQ ID NO: 557293 - DNA, 201 bp, Homo sapiens
attttttgtagagataggatctggctatgtttcccaggctggtctggaattcccagcctcaagcgatcctcccatctcggtttcccaaagcactgggattrtagacacgtgctttgtttagtctgttctcttacatactttttctctcccagagaaatattaaatgttttccatgctctttttgtctaccttctaatattt

SEQ ID NO: 557294 - DNA, 201 bp, Homo sapiens
gggtggctggaggggtggccttgaggggatgctgcagaccccactgggcacccagaaggcccccagggcagctcgcagaggccggtcaaccacacgttacygaaggttctgggggatttctccttgccattatcagcttgcaggcctcccgtgggcctgtgagctccgtaaagcagcagtttggctgtccctcaaaggatg

SEQ ID NO: 557295 - DNA, 201 bp, Homo sapiens
ctgggagttatgtctgattaaaggaactgtccccccagttcttgctgtcgacatctttgacaagttcaactttacgggagccagggtcccgcgattcgacrccatccatgaagagttccccagggagctggagtcctccgtctccttcccagccgacttcttcagaccacctgaagaaaaaggtaaaaccgcttagaaacc

SEQ ID NO: 557296 - DNA, 201 bp, Homo sapiens
gctgatgcttttgttggtccacccccatgctgggtgtggttcacacacttccatgtctctgtcccccaggatggcagggactgtagctaatgggtgtgggkgtgtgtgtgtgtgtgtgtgtgtgtgtgtgttttgagactgagtctcactgtgtcacccaggctggagttcagtggtgtgatctcagctcaccgcaacctc

SEQ ID NO: 557297 - DNA, 201 bp, Homo sapiens
gcaacctctgctgtcctcctgggtttcggccgagcacggtggatcttgcctcgagcgattctcctgcctcagcctcccaagtagctgggattgcttacacrcccagctaatttttgttatttttagtagagacggggtttcaccatgttggccaggctagtcttgaactcctgatttcaggtgatctgcctgcctcagcct

SEQ ID NO: 557298 - DNA, 201 bp, Homo sapiens
ctggccgggcgcggtggctcacgcctgtaatcccagcactttgggaggccaaggcaggcggatcacgaggttaggagatggagaccatcctggctaacacrgtgaatccccgtctctactaaaaatacaaaaaattagcctaactccccatgtggtggaggcaggggaggcagcatgggctgtgcagattgcggctcacca

SEQ ID NO: 557299 - DNA, 201 bp, Homo sapiens
cagatccacaacagctccggttggatcacagtgtgtgccgagctggaccgcgaggaggtggagcactacagcttcggggtggaggcggtggaccacggctsgccccccatgagctcctccaccagcgtgtccatcacggtgctggacgtgaatgacaacgacccggtgttcacgcagcccacctacgagcttcgtctgaat

SEQ ID NO: 557300 - DNA, 201 bp, Homo sapiens
tgctgatgcttttgttggtccacccccatgctgggtgtggttcacacacttccatgtctctgtcccccaggatggcagggactgtagctaatgggtgtgggtgtgtgtgtgtgtgtgtgtgtgtgtgtgtgttttgagactgagtctcactgtgtcacccaggctggagttcagtggtgtgatctcagctcaccgcaacct

SEQ ID NO: 557301 - DNA, 201 bp, Homo sapiens
ttgcagtgagccgagatcgcaccactgcactttagactgggcgacagtgcgagactccatctcaaaaaaaaaaaaaaattctcatctttattgtccacagytctcttgggctggcagtggctcgtggacacgtcgggccagggaacatatggttgtcccttggcaggtgctcagggccgcattgtcatgctggaaggcatc

SEQ ID NO: 557302 - DNA, 201 bp, Homo sapiens
atctgcctgcctcagcctcccaaagtgctgggtttacaggcgtgagccaccgcgcctggccccaagagcctgtttctaatctggaagaatatatatccagragggaataacacaagctaccagtttttaaaacaaaggggtgcatttttatggaaaagaaaaaagaggtaatttctgtccctggttgaaattgggccagaa

SEQ ID NO: 557303 - DNA, 201 bp, Homo sapiens
taaaggccgggggctcctcatcccttgtctacgtgccgcccaccctgtgccatgtcctcctcgctctatgagtgacaggtgcgcctgctgagggcactggyggagaaaacgctgacaccttctgtgctttctcttcttacagcccaatattggccacctgggcctgccccatgggccgtccggggaaaagatggccgtggt

SEQ ID NO: 557304 - DNA, 201 bp, Homo sapiens
ttgctgatgcttttgttggtccacccccatgctgggtgtggttcacacacttccatgtctctgtcccccaggatggcagggactgtagctaatgggtgtgggtgtgtgtgtgtgtgtgtgtgtgtgtgtgtgttttgagactgagtctcactgtgtcacccaggctggagttcagtggtgtgatctcagctcaccgcaacc

SEQ ID NO: 557305 - DNA, 201 bp, Homo sapiens
tctgcctgcctcagcctcccaaagtgctgggtttacaggcgtgagccaccgcgcctggccccaagagcctgtttctaatctggaagaatatatatccagawgggaataacacaagctaccagtttttaaaacaaaggggtgcatttttatggaaaagaaaaaagaggtaatttctgtccctggttgaaattgggccagaaa

SEQ ID NO: 557306 - DNA, 201 bp, Homo sapiens
gcagaccctcccatgccaggactagggtcctcttggaccatctcctctgtccctcccatccaccatcactggggacttggcctcaggttaatctgggcccygccactcagcccgagtcaccttaccaggcacattcagcttctttgtgccttggtgtcctcacctgtcaagggccagcgatggttcctcgtggtgcgtggg

SEQ ID NO: 557307 - DNA, 201 bp, Homo sapiens
taccagcacatagcacaagtttatcgagcttataacaagggtttgaggtattagcaggtatttatcaggcaggaagagcgcaggggagcagagagagagaggaaggatggcttccaaggttctctgcatcagaagtggagggaaaaccaccagcacgggtgttggcagcctgatgcaagggtgctcccggctctgacttcc

SEQ ID NO: 557308 - DNA, 201 bp, Homo sapiens
cggtcttgcttgggactgagcagctggggctggtgggccctgtggatgccaggtttactggtgcccagttcagacctcggacccgtccccaccgtcgtaayggctctccccagcagctccccttctcttgccctgtacccttggatttctgggcggaaggcctggggcgctcctccctacaggtgagtctgagagccaggg

SEQ ID NO: 557309 - DNA, 201 bp, Homo sapiens
agacacagactgtcatgctttcctattttctgtctaaggccttcatagagtttgtgtttaaggtgagcctctttccctttaccctgatgaaacatgtgcaraccttcctacctgggggtcatgtgacttgggagcatccactcacaagctagcctttgtgatacgcactgagaccgctgggctgtggttccagctgtgctg

SEQ ID NO: 557310 - DNA, 201 bp, Homo sapiens
tcctgacctcaggtgatccgcccgcctcggcctcccaaagtgctgggattacaaacgtgagccaccacgccccgcctggaatcggtttttatgtgttggaraaaaggacttcctgtgtgtgcaggctgtgtcctggtggtgcgggtgacagaccgtggagaagacacccccgggcttggcctcagcttcctgttatcgggc

SEQ ID NO: 557311 - DNA, 201 bp, Homo sapiens
accgcgatgcactgagctttcactacctcttcgccatcttcagcggcttacaggtaggtgacggccgagttgcccgcgggacccctgcctggccgccgtgrcaccatcgctgtgatgcgaagcagtggaggcctctgcggtcccaaaccagccctgcctgggtcccgcgtgggggcctcctgtggctgtgaggactcagtc

SEQ ID NO: 557312 - DNA, 201 bp, Homo sapiens
caggacagggctgggcaattcattcagaaacacccctcttattccagagcccagccgtgagcctcggccctgcagccccggctccctccggggagtgactyttctctttgatgctgggaggagggaccacagagtctggggaggtctggggaggtgctgagaggggccattgcattatccctgactttcagcaagggtctg

SEQ ID NO: 557313 - DNA, 201 bp, Homo sapiens
gccggctggaccgggagaatgtggccgtgtacaacctttgggctctggctgtggatcggggcagtcccactccccttagcgcctcggtagaaatccaggtraccatcttggacattaatgacaatgcccccatgtttgagaaggacgaactggagctgtttgttgaggagaacaacccagtggggtcggtggtggcaaaga

SEQ ID NO: 557314 - DNA, 201 bp, Homo sapiens
tatgaaggtttattgttctgtgagacttcctgtctgtcctgcatgtggccgtcagaggtcaggggtgcgtctgtgtgtgcaggacgggaagctcaggggcrtgttttgcggcgtgtctgcaggggcaccttactgtggacagaggtaccaagacaagagccggcctggggcgccgggacagtgcacatcagccattgtggt

SEQ ID NO: 557315 - DNA, 201 bp, Homo sapiens
ttaccagcacatagcacaagtttatcgagcttataacaagggtttgaggtattagcaggtatttatcaggcaggaagagcgcaggggagcagagagagagaggaaggatggcttccaaggttctctgcatcagaagtggagggaaaaccaccagcacgggtgttggcagcctgatgcaagggtgctcccggctctgacttc

SEQ ID NO: 557316 - DNA, 201 bp, Homo sapiens
tatcaccttggtggggccttctcctgccctccctgccaccctcgtcctgccctgacgatcccttcttcacggagcgcccaggatgcctggtgaagcaggcrtttgtcacatcagtgttcaggccttcctggggtgaccggtgctccagtataaagtgcagtcactgggcctgtggcactcagaggtctagcctcacccccg

SEQ ID NO: 557317 - DNA, 201 bp, Homo sapiens
gttaccagcacatagcacaagtttatcgagcttataacaagggtttgaggtattagcaggtatttatcaggcaggaagagcgcaggggagcagagagagagaggaaggatggcttccaaggttctctgcatcagaagtggagggaaaaccaccagcacgggtgttggcagcctgatgcaagggtgctcccggctctgactt

SEQ ID NO: 557318 - DNA, 201 bp, Homo sapiens
catcctcaggagccccacagaccccgccacctcactcccgtactcactactcacttgagctgacagcagggtctcccccagcaccgctggcactgctgatrttcagggcctctgtgacgggacatcctgagcactgctgggtacagagcagtgacctggcctttacctaccacgtaatggggtccagtagcacccactgtc

SEQ ID NO: 557319 - DNA, 201 bp, Homo sapiens
ttcactcacctcatgtctgggtagaggcagacctgggtgcccctcctgtgtgcgccagtgggccggggctgctttgttagggttgagtttattcttgatcrcctgcttttaggaccccaggggctgcgagaataatctttttccccgcccccgagatgagtcttgctctgttgcccgggctggagtgcagtggcacaacct

SEQ ID NO: 557320 - DNA, 201 bp, Homo sapiens
cgttaccagcacatagcacaagtttatcgagcttataacaagggtttgaggtattagcaggtatttatcaggcaggaagagcgcaggggagcagagagagagaggaaggatggcttccaaggttctctgcatcagaagtggagggaaaaccaccagcacgggtgttggcagcctgatgcaagggtgctcccggctctgact

SEQ ID NO: 557321 - DNA, 201 bp, Homo sapiens
tggcacaaccttggctcactgcagcctctgcctcctgagttcaagtaattctccggcctcagcctcccgagtagctgggattacaggcatgcaccaccackcttggttaatttttgtgtttttagtagagacagggttttaccatgttggccaagctgttctcgaactcctgaccttctgatcctcccgcctcggcctccc

SEQ ID NO: 557322 - DNA, 201 bp, Homo sapiens
tttggtctttgattggctgttccacaaaatgacggctcatttgataagcgagtttacaatggtcccagtggtgaatagtctgtctttttttttttttttttgaaagctctctgggattaggcaggatttggttcataccggagataactttgagactcttccatcgactgtgtcctcgattaatctgtttaatataaacac

SEQ ID NO: 557323 - DNA, 201 bp, Homo sapiens
aaaatgacacctggccatttggactgcctggaggatcagggtgcggcacgtgcagcagccccaggccagctgggtgctcgatggtgggtggttgttcacargagcggcaaaaccagaaactcactctgcaccctgtggtggctgcaggagttggttttgtagatttttctggtattttaaagtgtccccgcacacccacca

SEQ ID NO: 557324 - DNA, 201 bp, Homo sapiens
agcgattgtcctgcctcagcctcccgagtagcggagatgacaggcgcgcaccaccacacccggctaattttgtatttttagtagacatggggctttctccrtgttggtcaggctggtcttgaactcccgacctcaggtgatctgcccgcttcggcctcccaaagtgttgggattataggcgtgagccaccacgcccagccg

SEQ ID NO: 557325 - DNA, 201 bp, Homo sapiens
ctcccgacctcaggtgatctgcccgcttcggcctcccaaagtgttgggattataggcgtgagccaccacgcccagccgtaaacgaccctctttaattcagygacccagccttcctcttgcttgttttgggaggaaattcaggtggaagttcaagccatgagggtccagaggccagtcttgcagtagtggccgctcctcttg

SEQ ID NO: 557326 - DNA, 201 bp, Homo sapiens
ttttgtagatttttctggtattttaaagtgtccccgcacacccaccactttcctgagtctgcagctgtggcgctcacagccatgcctgagggaggctccaygacgctcactctgcttagaacatttccctcccaggtcctgcttgaaaagtgggtttcggttggctgatctcaacattttgggaggctgaggggggcggct

SEQ ID NO: 557327 - DNA, 201 bp, Homo sapiens
accttctgatcctcccgcctcggcctcccaaagtgctgtgggccctgtacgtccacgccacgtggacttcgggagtgtcgggtgctccctagctggggccktagcttggtttgggaatcaggaaccgagtaggtgagtagccacttgggagcgcttcagtgctgctggctttgagctttgtaccaactccctaggctggga

SEQ ID NO: 557328 - DNA, 201 bp, Homo sapiens
ctttggtctttgattggctgttccacaaaatgacggctcatttgataagcgagtttacaatggtcccagtggtgaatagtctgtctttttttttttttttttgaaagctctctgggattaggcaggatttggttcataccggagataactttgagactcttccatcgactgtgtcctcgattaatctgtttaatataaaca

SEQ ID NO: 557329 - DNA, 201 bp, Homo sapiens
gctttggtctttgattggctgttccacaaaatgacggctcatttgataagcgagtttacaatggtcccagtggtgaatagtctgtctttttttttttttttttgaaagctctctgggattaggcaggatttggttcataccggagataactttgagactcttccatcgactgtgtcctcgattaatctgtttaatataaac

SEQ ID NO: 557330 - DNA, 201 bp, Homo sapiens
acccagctgctgtcagcctgcagagccctcccctgaaactgaggtgcagggcaggacccctccccgtgcctccactggtacttgacacccctccctcacgmccctgtcagctgatcctgtcagcaccctggacatccctccccacacccccattagctggacacccctcccctacaccctcatcagctggacacccctccc

SEQ ID NO: 557331 - DNA, 201 bp, Homo sapiens
ccactgcactccagcctgggcgacagagcgagactctgtctaaaaaagaaaaagagaaaaaagtctcttgtcttactgttctggaggccagaaattcaaarccaaggtccctgcagggctgtgctctttctgaaggctttaggagagggcctctcctggcctcgtccagtttctggtagccccaggtggtatctgactcac

SEQ ID NO: 557332 - DNA, 201 bp, Homo sapiens
cagaatcctttcttgggaaaacgtgcttttcagataattcaggattacttcaagtttttctctccttggtgcttctcaagtcttttgcatttggctttttstacagagtccaggttttgagatttgccatgtccctggtacgtagctgtaaagctggggcattatttcatttctggataactgttttctataaaaatcttg

SEQ ID NO: 557333 - DNA, 201 bp, Homo sapiens
ttccctccggggaaaacagctggaggatgggcgctgggcccaggtgtgggctccacgaaccttgagatgatctcagtaacggtacttttttttttttttttaacttttttgagatgatctcactctattgtccaggcttgagtgcagtggcgtaatcttcgctcactacaacctccgcctcctcggttcaagcgattcctc

SEQ ID NO: 557334 - DNA, 201 bp, Homo sapiens
caaatgagctgtttcactcacatcagcctgttagtgctggggaatgctcctggcccaagagagacagaaatccctgccttgggggatggatttattacagmtggggaaactgaggcactagccaggatcttgctcaggaaacctctgtcctgacagcagtgctgtgggggtttggaatggggtgctgaggcccctgcaatc

SEQ ID NO: 557335 - DNA, 201 bp, Homo sapiens
acgtagctgtaaagctggggcattatttcatttctggataactgttttctataaaaatcttgccgggggatcagggtgtgggtcaatgtagccagatatcycctgttctccactcaatttctttccccaaagctggggcttttgataaacagaattagcgtcctgtgcggcgtgtgcaggcacagcccaccagcactggag

SEQ ID NO: 557336 - DNA, 201 bp, Homo sapiens
agtcagccctaaggaacacagggacaggaccttccccggctggtccagttcatccagaacccagttgctcttggttctcatggtcctttattaaaaaaaaraaaagatgttttaactataaaattaattcatttcatcaacacctttcctgcactatttgaatcaaatatgggaattatgtcgttttgtaactcatggatt

SEQ ID NO: 557337 - DNA, 201 bp, Homo sapiens
tgaaggcatgcgtagtgagcaggtcccaccatcggcgctgtggtgggggtctggcagtctctgctgtttataaccggccacgatctggacccagggctgcygggagctgctggagagtccgaattgagcctctgccctgagagtagtgacccagacgacctcgggggcgagtgttctctgctctctcacccgcttccggtc

SEQ ID NO: 557338 - DNA, 201 bp, Homo sapiens
cttgtgatctgcccgcctcagcctcccaaagtgctgggattacaggagtgagccaccacgcccggctccttccagagttttctatatatatatatatataacatgttcgtgcataagtaaagcagccccctcacaaaatgggatcacactgtgcgtgtccctttcattttatttgcgcatattttggacacacttatgttc

SEQ ID NO: 557339 - DNA, 201 bp, Homo sapiens
aacttgtgatctgcccgcctcagcctcccaaagtgctgggattacaggagtgagccaccacgcccggctccttccagagttttctatatatatatatatataacatgttcgtgcataagtaaagcagccccctcacaaaatgggatcacactgtgcgtgtccctttcattttatttgcgcatattttggacacacttatgt

SEQ ID NO: 557340 - DNA, 201 bp, Homo sapiens
ggggcagggggcgggagcagacacacagtaggtgctcagtaaacgtgtgatgagtggggagcaggggccagaacagaaactgttggagagaggtgggggawtatgggcctggaggcatttcagaagacatcctgtgtggacgtgtcctgatgcatgactttattttaatttttttgttctgagacagagtcttgctctgtc

SEQ ID NO: 557341 - DNA, 201 bp, Homo sapiens
agtcttgctctgtctcccaggctggagtgcaatggcatgatttggctcactgcaacctctgcctcccgggttcaagtgattctcctgcctcagctgcctcrgcttcccaagtagctgggattataggtacccgccatcatgcctggctaatttttgtatttttgtagagatggggtttcaccatgctggccaagctggtct

SEQ ID NO: 557342 - DNA, 201 bp, Homo sapiens
gtggaggtcagtccctcagcagatcagcgagggctcaggagatgggtcggggctgtggggcaggggctcaggcctggacagggagcctcctgttcctcccyatcacagctcgggagcattttccagcacagacctctcggattgcctggaaggtgtggtgtgcgccagggatgattacagctggcctgtgggcccttgtta

SEQ ID NO: 557343 - DNA, 201 bp, Homo sapiens
gctgcctcggcttcccaagtagctgggattataggtacccgccatcatgcctggctaatttttgtatttttgtagagatggggtttcaccatgctggccargctggtctccaactcctgacctcaggctatccgcccgcctcagcctcccaaaatgctgggattacaggcgtgagccaccgctcccagcctgggtcggacc

SEQ ID NO: 557344 - DNA, 201 bp, Homo sapiens
cgcactggtgtggccaggggaatttgaaccgttggggtgctgagcagccttttctcgtgatgagtgaggttttcgctagcattccagctgagcccgggcaygctgctgttcgtagttggcacggtttccctgcatgctgataacgaacgcaccgggcacgtcccttccagccctgctgtgcacagctgcctggctcacctt

SEQ ID NO: 557345 - DNA, 201 bp, Homo sapiens
ggaccacaggtgtgcaccaccacgcctggctaattttttatattttggtagagatggggtttcaccatgttgcccaggctggtctcgaactcctgagctcrggcaatccacccaccttggtctctcaaaatgctgggattacaggcatgagccaccgcgcccagcctacttcctctttatggctgaataatattccattgt

SEQ ID NO: 557346 - DNA, 201 bp, Homo sapiens
cagtggcactgtcttcttggcatgtgctgggccaagggcggcgtgaagtctgcgtccccctcactccaggaccaggaagtgttggctgggccctgtccccyctaggtaggacccaccaccaggctcatcctcatcttgggtcctggaggcctcctgagctgccaccaacgtccttctaaagagagccaagtccctggccca

SEQ ID NO: 557347 - DNA, 201 bp, Homo sapiens
gtggcaccatctcagtttactgcaacctctgcctcccaggttcaagcgattctcccacctcagcctcctgagtagctgggaccacaggtgtgcaccaccaygcctggctaattttttatattttggtagagatggggtttcaccatgttgcccaggctggtctcgaactcctgagctcaggcaatccacccaccttggtct

SEQ ID NO: 557348 - DNA, 201 bp, Homo sapiens
acagcaaagcagtggatcagtgggaatcatttttctttgctgctggaatgcatttcttatttttttaaatgggtgtgtctggagatcatctgggaatttgyttcagagacactaatgcagtcacgcagagaaggccagccctggacaagcggcttctgcagtgccgggctcccctggcctcccccttcccagctccctcct

SEQ ID NO: 557349 - DNA, 201 bp, Homo sapiens
atggggattgtgttatttataaactgtttaacatattcattcttagaaatctgacatttctaaattccagccaaactgagactcacaccgccttggaaggygacgcgccatggggtgggggtggctctggagaggcccctccctgagccctggacgccccaggcggtgagggggtgggaggccacggtgaaggggctgagg

SEQ ID NO: 557350 - DNA, 201 bp, Homo sapiens
tacttcctcttttttttttttttttttgagacggagtcttactctgttgcccacgctggagtgaagtggcaccatctcagtttactgcaacctctgcctcycaggttcaagcgattctcccacctcagcctcctgagtagctgggaccacaggtgtgcaccaccacgcctggctaattttttatattttggtagagatggg

SEQ ID NO: 557351 - DNA, 201 bp, Homo sapiens
aaaggcctgggaagaggaacccgagccaaggtcaggatggagggcttgtcttccagcagaacccaatgtgaggtgagagtttttgttctagtctttgaatrctggaaacgaatctcaccatctggaggtggcaggggagagaggcctgaaagaaataaattaaaatactcaactacagaaaaacctcgaagctgcaatcaa

SEQ ID NO: 557352 - DNA, 201 bp, Homo sapiens
tgtgttaggttctgggaaagaggcaggctcgccggcttcacagtgctcacctgtagtggggcccctgccccactgaacaggctccccagtactctaggggyggggcttcgggcggcacagccagcaagtttcagggatgggagagggagtccagactgcagcctgtgagcccagactgcgggcgaggcaggaggaggaggc

SEQ ID NO: 557353 - DNA, 201 bp, Homo sapiens
ctcccagcggtcttgcttgggactgagcagctggggctggtgggccctgtggatgccaggtttactggtgcccagttcagacctcggacccgtccccaccrtcgtaacggctctccccagcagctccccttctcttgccctgtacccttggatttctgggcggaaggcctggggcgctcctccctacaggtgagtctgaga

SEQ ID NO: 557354 - DNA, 201 bp, Homo sapiens
tgtggcctttcgtgtctggcttctttcacttggcggaaagtttgtgagtttcatgcacgttgtagcctggtcagtacttcctcttttttttttttttttttgagacggagtcttactctgttgcccacgctggagtgaagtggcaccatctcagtttactgcaacctctgcctcccaggttcaagcgattctcccacctca

SEQ ID NO: 557355 - DNA, 201 bp, Homo sapiens
cattaagcctctgcagttaataattatttttctctcctgaaagtgttggtgtgaaagagctgagtagacacgtggagactgcaggcctcactctaccttgkcaggaagatggcgacctgcatccccaacagacagctgtgtgtcctgggcacagttcctgagcctttctgggccccacatcccttgtcactggggtagcag

SEQ ID NO: 557356 - DNA, 201 bp, Homo sapiens
aactctttttgccttttaaaaaaattgaggtgaaactcacatacgataaaattaccactttaaaatgaacacttcagtggcatttgttacattcacgatgkgcaacctctccttctgtgcagttctagaacattctcatcacctgagaaagccccatacccagtaagcttaatcacttctggtccctcttgccccttgcgc

SEQ ID NO: 557357 - DNA, 201 bp, Homo sapiens
ttgggtataaacatatacaccatttctgtgtttccccacccacctccaagtgcaaattgctttttatttttatttattaatttattttgagaccaggtctyactctgtcacccaagctggagtgcagtagcatgatctcaactcactgcagtgggatcttgactcagtgcagcctccactctcaggctcaagcagtcctcc

SEQ ID NO: 557358 - DNA, 201 bp, Homo sapiens
tcgcttgaactcgggaggtggaggttgcagtgagccgattgtgccactgcactccagcctggtgacagagcaagactccgtctcaaaaaaaaaaaaaaaaagccaataaaacaaaacaaaacaaaaaaacaggctcgttggccactcagcgtctccccacaggagttcccggcactccccaacaaggggtttcttgtggtc

SEQ ID NO: 557359 - DNA, 201 bp, Homo sapiens
agcgtcacacctcccgtgaacgcacgggatttacaaaggccaggaagccacgagcactgacttgctcatatgagtgtgcagctgggtgtgcaggtatgcayctgtgtgtgacaggatgtgaggtgtctgtgagggtgtgtcaacacatgtgtatgtatgtgtgtgtgtgtgaacaggtgtatggacatgtgtagacgggaa

SEQ ID NO: 557360 - DNA, 201 bp, Homo sapiens
ctgaggcaggagaatcgcttgaacccgggaggcagaggttgcagtgagccgagatcgcaccactgcactttagactgggcgacagtgcgagactccatctsaaaaaaaaaaaaaaattctcatctttattgtccacagttctcttgggctggcagtggctcgtggacacgtcgggccagggaacatatggttgtcccttgg

SEQ ID NO: 557361 - DNA, 201 bp, Homo sapiens
tttctgaacatctgacatttttttacctagatggaaactccatgagggcagggatctgttttgttcattcttataaccccactgcctaaagaatggcccaygctggcagtttattagatggatgagtgggtggagggacaggtgggcagctgagtgcaggtgagtaggtggaagggtggatagatggatgaatgatggata

SEQ ID NO: 557362 - DNA, 201 bp, Homo sapiens
aggcagaagaaaggaggctggagtgagagtccgaggctcccatggcctgggcgccccaaagccagaggtctctgaacggcccccaagccagtggagggagyctggcgtgctgccgcaggccccagggatgcccagggcccagggcattgaaggagcctcaggaggggcagttccaggcccagagccatgagcactcggcct

SEQ ID NO: 557363 - DNA, 201 bp, Homo sapiens
gctacttgggaggctgaggcaggagaatcgcttgaacccgggaggcagaggttgcagtgagccgagatcgcaccactgcactttagactgggcgacagtgygagactccatctcaaaaaaaaaaaaaaattctcatctttattgtccacagttctcttgggctggcagtggctcgtggacacgtcgggccagggaacatat

SEQ ID NO: 557364 - DNA, 201 bp, Homo sapiens
atggggggtaagcgagtggctggatggatggggggtgagtggatggatggatgggggtgaatgagtggatggatgggtggaggggtgagtgagtggatggrtagatggggtgagtgagtggatggatggatgggtggggagcgagtggatggatagatggggtgagtgagtggatggatggatgggtggggagcgagtgga

SEQ ID NO: 557365 - DNA, 201 bp, Homo sapiens
cagtggctgaagagcctgagagctctgagcaggacctgctgcagggctgggttgggctcgttgctgtgtttactaagacgtctcatcttcggctgggcackgtggctcacacctgtaatcccagcgctttgggaggccgaggcggacagatcacaaggtcaggagttcgagaccagcctggctaacatggtgaaaccccgt

SEQ ID NO: 557366 - DNA, 201 bp, Homo sapiens
caggtaccaacaggctggcaggttagagttggtggagtttgcagagagatatttcctcttcgttgccaacatcctgtttaccagaagtgtttctgcatcaytttccataagctgtgaaacaaaatccatgaggtcactcacttagaagggaaaaaatgttttctgtgtctttgttttcctggttttgtgtaatttatacaa

SEQ ID NO: 557367 - DNA, 201 bp, Homo sapiens
tgaggctcacctggagtggtaggggcttccagggcagggcccagacagttttcccctggcagctgccgcagcctttctgcacaggagggccttcgggctcrggggtaggagcggcttgacgcaggttggtccctggagatgagtcagcatttcagaggcactgctgacaagcatgggggtcgggacagacctgagtccagc

SEQ ID NO: 557368 - DNA, 201 bp, Homo sapiens
tacagctgcgctgcccagggcactcagaccggctccaagaagtgagcatcccaggaggggaggccctgggggtccgtacccccaaacatgctcaccctgcrgccttcccagggcagggccccacgtaggcactctgggtgcagtgccctggcgacctcattccaggctagagtcagacatcctgtccatggttggggcacc

SEQ ID NO: 557369 - DNA, 201 bp, Homo sapiens
ggcctctctagggatgaagggatccagaagctcggcgtgtcctctgggctggtgaggggcagccacggagagccagacgcgtccctcatgcccaggagctscaaggatccccctggtatggcttccctggagggggaggaccccgtgggttgtttttcccacgtcccttcggtcactggacagactgcccctgaagaagca

SEQ ID NO: 557370 - DNA, 201 bp, Homo sapiens
tcccaactatgaccgagaaggtgaaggaggctctctcatccattgggaaataaaagtctttgccagtggccatcggggctgagggcaataatgtattttttataaggaattgggaattttagtctttttttttttttgagacatggtcttgttctttcgcgcaggctggaaggctggagtgcagtggcacgatctcagctc

SEQ ID NO: 557371 - DNA, 201 bp, Homo sapiens
caccagtgcatcgagtgccaccatgtgcctctggcttaagcccaggctttgatcaccagtgagctggagaagttccaggaccacctggtccggtgcaccaygcattgcaacgacaaagccaaagattcaatagatgctgggagtaaggagcttcagttgaagcagaagctggaaggtggtgtgaccaagtgtgtggatgac

SEQ ID NO: 557372 - DNA, 201 bp, Homo sapiens
gtttcactatgttggccaagctggtctcaaactcctgacctcaggtgatcctcctgccttggcctcccaaagtgctgggattacaggcgtgagcccctgcrtccagcctttatttttttttgagacagagtctcagtctgtcgcccaggctggagtacaggggcatgatcttggctcactgcaacctctgcctcccaggct

SEQ ID NO: 557373 - DNA, 201 bp, Homo sapiens
gagatcgagaccatcctggccaacatggtgaaaccctgtctctactaaaatacaaaaaattagcctggcgtggtggcccacgtctgtagccccagctactygggaggctgaggcagggaaatcgcttgaactcgggaggtggaggttgcagtgagccgattgtgccactgcactccagcctggtgacagagcaagactccg

SEQ ID NO: 557374 - DNA, 201 bp, Homo sapiens
tagtagagagggggtttcactatgttggccaagctggtctcaaactcctgacctcaggtgatcctcctgccttggcctcccaaagtgctgggattacaggygtgagcccctgcgtccagcctttatttttttttgagacagagtctcagtctgtcgcccaggctggagtacaggggcatgatcttggctcactgcaacctc

SEQ ID NO: 557375 - DNA, 201 bp, Homo sapiens
gagtcttgctctgtcgcccaggctggagtgcagtggcacgatctccgctcactgcaacctccacctcccgggttcaagcgattatcctgctgcagcctccygagtagctggaattgcaggtgtgcgccactacgcccggctaatttttgtatttttagtagagagggggtttcactatgttggccaagctggtctcaaact

SEQ ID NO: 557376 - DNA, 201 bp, Homo sapiens
tcttaatattcttttttgacctgttttccagtttactagcttgcttagctgggtacaatctcatcttactcggagaagtaaggtattagtgtgttctcacmctgataataaagacatacctgagactaggtaatatataaagaaaaatggtttaattgactcacagtcccacatggctggggaggcctcacaatcatgggg

SEQ ID NO: 557377 - DNA, 201 bp, Homo sapiens
taactttttttttttttttttttagatttgcaacagagtcttactctatcgcccaggctggagtgcagtggcacgatctcggctcactgcaaccgccatckcccgggctcaagcaattctcctgcctcagtctccggagtagctgggattacaggcgtgagccaccatgcctggctaatttttgtatttttagtagagaca

SEQ ID NO: 557378 - DNA, 201 bp, Homo sapiens
aaaaaacaggctcgttggccactcagcgtctccccacaggagttcccggcactccccaacaaggggtttcttgtggtcagacgtttggattcctgttcagsaaacgaatgccttcagattgttctgtgaggacttgaagcaaagcagagacaacagaaggctcctgataaactccaggtgtttgatccctgtcgaagtccc

SEQ ID NO: 557379 - DNA, 201 bp, Homo sapiens
atttctgtggggctacaaatacataaaacctaatgttaaacattaagctgggggaaattgccatgaaaatgacaatagttccttccataatttacaaggarcttctataacacaataagagcaggaccaaaaacccagcagaaagacaaactcaggcagcttctaggaaagagagtgtcaattgtcaataaaacaggaaaa

SEQ ID NO: 557380 - DNA, 201 bp, Homo sapiens
gtgatattagcgtcagctcttccatctctccagatctgagccaaaggtgccatgggaagaatttggagctgctgttcttgagaccttgggtgtgtggaagygggagtgggagtgggagtgagggcaggaagtggagggggcagggggcgggagcagacacacagtaggtgctcagtaaacgtgtgatgagtggggagcagg

SEQ ID NO: 557381 - DNA, 201 bp, Homo sapiens
ataaactccaggtgtttgatccctgtcgaagtcccggctggtgccttcactgtggcgggtgggcctgtgtgggcttctcccatgatatttagctcatggtrtaaacagatggcgactttggctctacccaagccatactcagcatctttaaggtgggggagtttggtgtctccagggtcggaaggtggcttcctgctcttg

SEQ ID NO: 557382 - DNA, 201 bp, Homo sapiens
cagaagagtccagctcagcctgcagggtgctcagaacggggttggaggctgggaagggctcattgctgccatttctttgaccccacagagtgctttttggraaccccctggccaccatccttagtttgcccaccaggagctgggtgcagccgactctggcacggctctgggcaagtccttgagaactcaggggtttctgtt

SEQ ID NO: 557383 - DNA, 201 bp, Homo sapiens
ggtgtgggttcaagccgtgttcctgccgaaccgtcccactgagctcactggcacgcacgcctaggtgcacgctctatggcactacggtggcctcctgtgcygcactcgccggctgtaggcgagcagggaagctgcgggcttaggagcaggaagggctcagctccttagtgggactctcatcccccaagaccatccccctgt

SEQ ID NO: 557384 - DNA, 201 bp, Homo sapiens
cgactttggctctacccaagccatactcagcatctttaaggtgggggagtttggtgtctccagggtcggaaggtggcttcctgctcttggaaggagaagtrgttccacgtcttagaaacctgttcatttctgacttcattcgacagcttggtttgaaggaaatggttcttgaaatgccctttagaatcgctttctcctttt

SEQ ID NO: 557385 - DNA, 201 bp, Homo sapiens
ttgcactggacaattatgaacagtttcccttatgtgtgacggtggctaaaccatcagagctgaccctaaatcaccgagggttttgtagggaatacctttaraagtaaaatcataaggtgcctccccaagcttccagggcagtgacactttgggagcagtgggggctgtgggcagggccctcttgagcctctgagagccgct

SEQ ID NO: 557386 - DNA, 201 bp, Homo sapiens
gaatggcatgaacctgggaggtggagcttgcagtgagccgagatcacgccactgaactccagcctgggtgacagagcaagactccgtctcaaaaaaaaaaagggcagggctgtggcacgggagtggtcactgctgtgccgtagaaactgctgcttctggggactttccactgtggtgcggggggtgcgtttgttctttttg

SEQ ID NO: 557387 - DNA, 201 bp, Homo sapiens
gcccagctggcagggtcctcccaagcaccgtctgccttcacgatccctcctgcaccatctcactgccaccctccagggtctctggtcttcctcagcagccyccggcccagatacgccccctgcctcatggggccaatccaggagcagctcctgccacctgggccagtgagcctgagaccctacacggagagactgtgcttg

SEQ ID NO: 557388 - DNA, 201 bp, Homo sapiens
gggaggtgaacattgcagtgagctgagattgtgccactgtactccagcctgggtgacagaataacaccctgtctaaaaaaaaaaaaaaagagagagagagaatagagactatgtttcctttctgctagttcacaagaaaaacttttaaaaagttactttctcacggctgggcgtggtggctcacacctgtaatcccagcac

SEQ ID NO: 557389 - DNA, 201 bp, Homo sapiens
cttttaaaaaaattgaggtgaaactcacatacgataaaattaccactttaaaatgaacacttcagtggcatttgttacattcacgatgtgcaacctctccytctgtgcagttctagaacattctcatcacctgagaaagccccatacccagtaagcttaatcacttctggtccctcttgccccttgcgcttggcaaccagc

SEQ ID NO: 557390 - DNA, 201 bp, Homo sapiens
cgggaggtgaacattgcagtgagctgagattgtgccactgtactccagcctgggtgacagaataacaccctgtctaaaaaaaaaaaaaaagagagagagagaatagagactatgtttcctttctgctagttcacaagaaaaacttttaaaaagttactttctcacggctgggcgtggtggctcacacctgtaatcccagca

SEQ ID NO: 557391 - DNA, 201 bp, Homo sapiens
agggctacgggaaccccgacttctgctggctgtcgcttcaagacaccctgatttggagctttgcggggcccatcggagctgttataatcgtgagtgtgggrccttcacgggagtccgggtgccccaaacatgcatgagctggaagggctgttctgggttggctggggccaccaactcctctgagcagccgacggggggcag

SEQ ID NO: 557392 - DNA, 201 bp, Homo sapiens
gcatttgttacattcacgatgtgcaacctctccttctgtgcagttctagaacattctcatcacctgagaaagccccatacccagtaagcttaatcacttcyggtccctcttgccccttgcgcttggcaaccagcatggcttctgtctctgtggattctgggtgtttcatatcaatgaaatcatgattatgtggcctttcgt

SEQ ID NO: 557393 - DNA, 201 bp, Homo sapiens
aaggtttcctgccaaagaaagcaccattattatgggaaaaaagggatcgtgtaagtggggctgaacctgaccggccagccatgtcggctgggccctgagaycccgacgtccagtctctgcggggtggggccccatgagagcgtgtaggcctcatggaggagggctgggggcagcctgggtgagccccagggctccagagag

SEQ ID NO: 557394 - DNA, 201 bp, Homo sapiens
gaggctgctcctgggatggggcctataggacctgtgactcccgcagcatctgaatgaccctgactttccttgtgtctgcagatggcatccacagcgtcacrgccttctgcaccctgcgtgtcaccatcatcacggacgacatgctgaccaacagcatcactgtccgcctggagaacatgtcccaggagaagttcctgtccc

SEQ ID NO: 557395 - DNA, 201 bp, Homo sapiens
tgtccgcctggagaacatgtcccaggagaagttcctgtccccgctgctggccctcttcgtggagggggtggccgccgtgctgtccaccaccaaggacgacrtcttcgtcttcaacgtccagaacgacaccgacgtcagctccaacatcctgaacgtgaccttctcggcgctgctgcctggcggcgtccgcggccagttctt

SEQ ID NO: 557396 - DNA, 201 bp, Homo sapiens
caccatctccctcacgtgagtgtgcgtcccgccgcgccacacgggggtctctttaggaaaggggcgagcttctccgtgcaccccatccctctagatcgtgrcgttgatgtcctccgtgtgtggcctttgatagttgagtagctccaggccaggcgcggtggctcacgcctgtaatcccagcactttgggaggccgaggcgg

SEQ ID NO: 557397 - DNA, 201 bp, Homo sapiens
taagttgatgaacggttggtctatgagtcgactgtattggttttggttgtctggtgctgtgtaacaaagcgtcccaaacccagtggcctccaactctggtygtattatctactcacagtgtggccaggctcagtgtggggctggtctctgctctgtggtgtccgggtcctccctggggtggcttgagtctcagcagcccgg

SEQ ID NO: 557398 - DNA, 201 bp, Homo sapiens
ttattttcagctttacttgtgacgttcacttctctcccggatcctccataatgagccagacagaagctgcctggcggccccgcatgcagcctcccaggcayatgggcctcctcccgtccaaacggagctttgagtctttgcttgaatcttcttactcactggtttcaaaataggcatccagctcattagcctcagggagag

SEQ ID NO: 557399 - DNA, 201 bp, Homo sapiens
tgaatctcccagcaaagggtctgctgccctcctggctggagcgaggcaggttggattgctgggggctggcctctattccaagggctccaagtctgcttggstcttaggtcctgtccctgtcctgtgattatagctaagctgagtcttgtccatctgaggccatccgaggccacttacctcatcaggagagagcctcccccg

SEQ ID NO: 557400 - DNA, 201 bp, Homo sapiens
gcctcccaggttcaagcgattctcccacctcagcctcctgagtagctgggaccacaggtgtgcaccaccacgcctggctaattttttatattttggtagasatggggtttcaccatgttgcccaggctggtctcgaactcctgagctcaggcaatccacccaccttggtctctcaaaatgctgggattacaggcatgagcc

SEQ ID NO: 557401 - DNA, 201 bp, Homo sapiens
ccagtgagcctgagaccctacacggagagactgtgcttggaggggccctgggctggctccctggactccttgctccttcctctgagaagggagatgctgaktcccccatttcaccccaccctggctggtccttggcatggggtggccactgggcacgtggccctcacccttcccttcctccccgctgtgttcaggactggc

SEQ ID NO: 557402 - DNA, 201 bp, Homo sapiens
cccctgacttcctctgtccccataagctctttctcccactcttcctccctcctctgcttttaaggatcctgtggccacccagatcctccaggatactctcktgggttaaggttgctggtgagcggccgtgcccctgtgccatgtggcataacgcagtcacagcttctggggattgagacatgcagctcttcttgggaagtg

SEQ ID NO: 557403 - DNA, 201 bp, Homo sapiens
gggctcagggctggggctgcaagggtgatcttgagggtggtgggtgacactgccgagggaacccccctgcacacgcgtccctgcctgccttggctgatgcrgacggtcatcccccctgccccgcccagctgtgtccttgccccagcacgctccatttacctgccacaccacctcgctggttttggtttttgcatttttggg

SEQ ID NO: 557404 - DNA, 201 bp, Homo sapiens
tcgggaggtgaacattgcagtgagctgagattgtgccactgtactccagcctgggtgacagaataacaccctgtctaaaaaaaaaaaaaaagagagagagagaatagagactatgtttcctttctgctagttcacaagaaaaacttttaaaaagttactttctcacggctgggcgtggtggctcacacctgtaatcccagc

SEQ ID NO: 557405 - DNA, 201 bp, Homo sapiens
ttcgggaggtgaacattgcagtgagctgagattgtgccactgtactccagcctgggtgacagaataacaccctgtctaaaaaaaaaaaaaaagagagagagagaatagagactatgtttcctttctgctagttcacaagaaaaacttttaaaaagttactttctcacggctgggcgtggtggctcacacctgtaatcccag

SEQ ID NO: 557406 - DNA, 201 bp, Homo sapiens
tcgtcaccttccggggcctgagacagcgcttccacttcaccatctccctcacgtgagtgtgcgtcccgccgcgccacacgggggtctctttaggaaagggrcgagcttctccgtgcaccccatccctctagatcgtgacgttgatgtcctccgtgtgtggcctttgatagttgagtagctccaggccaggcgcggtggctc

SEQ ID NO: 557407 - DNA, 201 bp, Homo sapiens
attcgggaggtgaacattgcagtgagctgagattgtgccactgtactccagcctgggtgacagaataacaccctgtctaaaaaaaaaaaaaaagagagagrgagaatagagactatgtttcctttctgctagttcacaagaaaaacttttaaaaagttactttctcacggctgggcgtggtggctcacacctgtaatccca

SEQ ID NO: 557408 - DNA, 201 bp, Homo sapiens
ttgcttgaattcgggaggtgaacattgcagtgagctgagattgtgccactgtactccagcctgggtgacagaataacaccctgtctaaaaaaaaaaaaaaagagagagagagaatagagactatgtttcctttctgctagttcacaagaaaaacttttaaaaagttactttctcacggctgggcgtggtggctcacacctg

SEQ ID NO: 557409 - DNA, 201 bp, Homo sapiens
acacgtgggaatcgtgggagctacaattcaagatgagatttgggtggggacacagccaaatcatatcactaatgaaattttaatcttttttttttttttttgagacggagtctcgttctgtcacccaggctggagtgcaatggcatgatcttggctcactgcaacctctgcctcccaggttcaagcgattctcctacctca

SEQ ID NO: 557410 - DNA, 201 bp, Homo sapiens
tgtacaatgtgtgttttaagctaagtgttgttacaaaagagtcaatttttttttttttgagacaaagtctcattctgttgcccaggctggagtgcagagtkcagtggtgccatcttggctcactgcaacccccacctcccgagttcaagtgattctcctgcctcagcctcccgagtagctaggattacaagcttgcaccac

SEQ ID NO: 557411 - DNA, 201 bp, Homo sapiens
gctagtttttgtgtttttagtagagacagggtttcaccatgttggccaggctggactcgaactcctgacctcaggtgatccacctgcctcggcctcccaargtgctgggattacaggcgtgagccactgtgcttggcccaagaaaatatttttgaacagctgtacaatgtgtgttttaagctaagtgttgttacaaaagag

SEQ ID NO: 557412 - DNA, 201 bp, Homo sapiens
actcagttacccaggcgggagtgcagtggcgtgatcttggctcactgcaacctccgtctcctgggctcaagtgattttcctgcctcaccctcctgagtagstgggagtacaggtgtatgccaccacaccaggctagtttttgtgtttttagtagagacagggtttcaccatgttggccaggctggactcgaactcctgacc

SEQ ID NO: 557413 - DNA, 201 bp, Homo sapiens
cactgtaacctcaaatcctgggttcaagccatcctcctgcctcagcctcctgagtagctgggactacggatgcacatcgccacacctggctacttttaaaattttttagtttttatcagaggtcttgctgtgttgccagggctggtctcaaactcctggccttaagcagtttctcctgcctcagcctcccaaagtgctggg

SEQ ID NO: 557414 - DNA, 201 bp, Homo sapiens
acttgttgcaaatatctttcataattttgaattttattttaactcaatggtctcttttgccatgtaggtcttaaatgtttatgtttttcttcttctcttcytgagacaaggtcttgctctgttgcccaggccggagtgcatggtactgtcatagctcactgtaacctcaaatcctgggttcaagccatcctcctgcctcag

SEQ ID NO: 557415 - DNA, 201 bp, Homo sapiens
ttggtcaggctggtcttgaactcccgacctcaggtgatctgcccgcttcggcctcccaaagtgttgggattataggcgtgagccaccacgcccagccgtaracgaccctctttaattcagtgacccagccttcctcttgcttgttttgggaggaaattcaggtggaagttcaagccatgagggtccagaggccagtcttgc

SEQ ID NO: 557416 - DNA, 201 bp, Homo sapiens
acatgtcccaggagaagttcctgtccccgctgctggccctcttcgtggagggggtggccgccgtgctgtccaccaccaaggacgacgtcttcgtcttcaaygtccagaacgacaccgacgtcagctccaacatcctgaacgtgaccttctcggcgctgctgcctggcggcgtccgcggccagttcttcccgtcggaggacc

SEQ ID NO: 557417 - DNA, 201 bp, Homo sapiens
agagcagctcttacgcctcctcacactcgtcagacagcgaggacgatggggtgggagctgaggaaaaatgggacccggccaggggcgccgtccacagcacmcccaaaggtgagtgtgtggggcacattgggccaggctgggctgtggacagcgggctcggggcaggccttggctatggctgggtcccttcctcccaggata

SEQ ID NO: 557418 - DNA, 201 bp, Homo sapiens
gggtagccatgaggggtgggatggctggcggccaacacacacacccgggtgggagtctggacgtcgctcgggaaacacgctgcaaggtagggcctctcccrggcatctgaagtcacaggccctgcctctggcttttgcaggagaattactacaagctcctagcccaggacacctgtctgccctgcgactgcttcccccatg

SEQ ID NO: 557419 - DNA, 201 bp, Homo sapiens
ttgccgtggggacagagtcattccccgtggtggtcatgtggtggccaccacttggcagtgaccagcccctcccctcccttcagcgctccctcaactgcaayaccaccttcggtgacgggcctgacatgctgcgcacagacttgggcgagtccaccgcctcgctggacagcatcgtcaggtcaggccgcagctccgggttcg

SEQ ID NO: 557420 - DNA, 201 bp, Homo sapiens
tcctgaccagaagcagtggccgtagggagggcggcagcccctgaccacagcgcgggccaggatgtgcttccctcagctgccaggaggctctcgtttgcagkgagggttgactgcttggggccagctcctcctgtgtgccaggcaggggcccagccagggtgtgggtgtggggggcttgccgtggggacagagtcattcccc

SEQ ID NO: 557421 - DNA, 201 bp, Homo sapiens
gcagagaatcttccagagaactttccagcacctcctgttccctgacggatgatactgagcccaccctccctggcctctctagggatgaagggatccagaarctcggcgtgtcctctgggctggtgaggggcagccacggagagccagacgcgtccctcatgcccaggagctgcaaggatccccctggtatggcttccctgg

SEQ ID NO: 557422 - DNA, 201 bp, Homo sapiens
gagaatcttccagagaactttccagcacctcctgttccctgacggatgatactgagcccaccctccctggcctctctagggatgaagggatccagaagctsggcgtgtcctctgggctggtgaggggcagccacggagagccagacgcgtccctcatgcccaggagctgcaaggatccccctggtatggcttccctggagg

SEQ ID NO: 557423 - DNA, 201 bp, Homo sapiens
ggaatgccccagacggcgctgtcgggaggcgcagaggcccgagtggtctggcaaagccgggtgctgagccaaggagccctgagctcggtgcttcccgggcycctggtacctgctgagagtctcaggccggaaggggtccagaggtttgggtgatcatttccgagggctgggttttcagctggtgtgctgctgccctggcag

SEQ ID NO: 557424 - DNA, 201 bp, Homo sapiens
cagagccgtgacgacacagggagagccatagccacttggcgcagaggcagaggccagaggggtgcacctaggagccaagcaacgccaaggactgctggacscccagcccccagggaaaggggcccggaacagaccctcccctgagcctccaggaggaacaaaccccgccaacacctgaatttcagatccctggcctccaaa

SEQ ID NO: 557425 - DNA, 201 bp, Homo sapiens
gggctgccatttaaaaataccacagaatgggtggcttaaacaacaaacacttgttttcttacagttcttgaggctgcaagtccaagatcagggaggcagcrcggccaggttcctggaggctttgttttcctggctggtagacagtgccttcttgctgcgtcctgatgcggaggagaggagagctctctgctgtctcttcct

SEQ ID NO: 557426 - DNA, 201 bp, Homo sapiens
gtggccaggctcagtgtggggctggtctctgctctgtggtgtccgggtcctccctggggtggcttgagtctcagcagcccggtgggtcacatctggggtcyggggcttccattggccggggccctggacgggagtgctgccttcttcccgatgtgccctctctagtgtgggttctgggcaccaggaagaaagaggcagaac

SEQ ID NO: 557427 - DNA, 201 bp, Homo sapiens
gaacacagaatccgagccaggcctggaggacctggacttggcaggctattctgcaaatcccaccccacatctgagcccgggcctggaggtggcaggtgagrgcccctgggcaggggccgctgctccgtccctgggagccactggtacccatgacccaccccctgaacgtctcatccaattctgggcctggaaccgatgatg

SEQ ID NO: 557428 - DNA, 201 bp, Homo sapiens
ggcttgagtctcagcagcccggtgggtcacatctggggtctggggcttccattggccggggccctggacgggagtgctgccttcttcccgatgtgccctcyctagtgtgggttctgggcaccaggaagaaagaggcagaaccttccagccctcttggggcctgggccaggaactggaggacgtgtttcctgctacatcctg

SEQ ID NO: 557429 - DNA, 201 bp, Homo sapiens
agatactccctgctctgatcctgcttcctctccccatcccttatttcagcccacgggctcacagtggatgccccttggccccacgttcagcctcttgccaygacctaatgacgctgcctccccagcccagttcttctctctgctgcctgtccctgttttcatgttatcaccttggtggggccttctcctgccctccctgcc

SEQ ID NO: 557430 - DNA, 201 bp, Homo sapiens
ccctcattatgcttaagtgtttgctgctcctccatcgccctcggcatcctgggtgtttgggaagtgtggggagaagcttattccccacggagacagtgctrgggaggggccgtctggaaggatggggatcctcggggctgcactgagcgggtcattcccttactgtgcttccctgaggctgcctgcggggatcacgtttag

SEQ ID NO: 557431 - DNA, 201 bp, Homo sapiens
gaatttttaacttgttgcaaatatctttcataattttgaattttattttaactcaatggtctcttttgccatgtaggtcttaaatgtttatgtttttcttyttctcttcctgagacaaggtcttgctctgttgcccaggccggagtgcatggtactgtcatagctcactgtaacctcaaatcctgggttcaagccatcctc

SEQ ID NO: 557432 - DNA, 201 bp, Homo sapiens
ataaatgtcttccttttttgatttgcatgtctctttggggaaaatgcagttttttatctgcttagcagccattcctgttttttttttttttttttttttttggagacagatgtcgccaggctgggatgcagtggcgcaatctcagctcactgctgcctccgcctcctgggttcaagcgattctcctgcctcggcctcccaa

SEQ ID NO: 557433 - DNA, 201 bp, Homo sapiens
tttttttttttttttttgagacagagtcttgctctgtcgcccaggctggagtgcagtggcgccatctcggctcattgcaagctctgcctcccgggttcacrccattctcctgcctcagcctcccgagtagctgggactacaggagcccgccaccatgcctggctgattttttgtatttttaatagagacggggtttcaccg

SEQ ID NO: 557434 - DNA, 201 bp, Homo sapiens
gcctggtttgcaagttgctttttaaggatgtttgattgcagaccttgcgttctagcaaatgaagacctgccttgctcttttttttttttttttttttttttgagacagagtcttgctctgtcgcccaggctggagtgcagtggcgccatctcggctcattgcaagctctgcctcccgggttcacaccattctcctgcctca

SEQ ID NO: 557435 - DNA, 201 bp, Homo sapiens
ccgtgtgatttcgggagacacctgaggtccctgggcctgtgtccgcagccatgcctcacccccagctcttcagcggtgagagcgtcgtgtcctggagtgayctgaacatcatcatctctgtgccctggtacctggggctcatgttccggacccggaaggaggacagcgttctgatggaggccaccagtggtgggcccacca

SEQ ID NO: 557436 - DNA, 201 bp, Homo sapiens
agtttcactcttgtcgcccaggctggagtgcagtggtgcggtctcagctcactgcaacctccgcctccctggttcaagcgatcctccagcctcagcctccygagtagctgggattataggcacacaccaccacacctggctaatttttgtatttttagtagagtcggggtttcaccgtgttggccaggctcctgacctcag

SEQ ID NO: 557437 - DNA, 201 bp, Homo sapiens
aagtgtcctcgcagccccccagcccctcactcagtgcaggccctgggcactggaggggtgccagatacagggacaggatgcctaggaggtgtcgtgtgatsatgacgcctttaaaatctagcagagaaaatggctgagcgctggcctgtcctgcccagatggaggccactggttggaaagaggtgagggtcgtggctatcc

SEQ ID NO: 557438 - DNA, 201 bp, Homo sapiens
ccatcaccccctctgcacctcatctcctcatctgtagaaggccgtgatgagagctgccttgcaggtgtcatggcacatggggtcattggagcccccgcttkgcaggtctgcacccccttgtccagaccctgtggtgcctgtgaacctggccatcttggggactctctaggacttggccatgggagcagagaagtgtcctcg

SEQ ID NO: 557439 - DNA, 201 bp, Homo sapiens
gtcccaggtagagaggaggctggcttggcccaaccctgccctgctcagtggtttggggtacccatcaccccctctgcacctcatctcctcatctgtagaargccgtgatgagagctgccttgcaggtgtcatggcacatggggtcattggagcccccgcttggcaggtctgcacccccttgtccagaccctgtggtgcctg

SEQ ID NO: 557440 - DNA, 201 bp, Homo sapiens
gacagaacagtagcctgtgggtcccaggtagagaggaggctggcttggcccaaccctgccctgctcagtggtttggggtacccatcaccccctctgcaccycatctcctcatctgtagaaggccgtgatgagagctgccttgcaggtgtcatggcacatggggtcattggagcccccgcttggcaggtctgcacccccttg

SEQ ID NO: 557441 - DNA, 201 bp, Homo sapiens
tctgggctggtgaggggcagccacggagagccagacgcgtccctcatgcccaggagctgcaaggatccccctggtatggcttccctggagggggaggaccycgtgggttgtttttcccacgtcccttcggtcactggacagactgcccctgaagaagcactagcagcctcgccatgctcagcgtcagcatgccaggggccc

SEQ ID NO: 557442 - DNA, 201 bp, Homo sapiens
tttacactagcctgggtgagaagagcaagactccgtctcaaaaataaaagtggttaccatgttaagatccgtattatgtacattttattacaagaaaaaaatgctagaaggactaatgcaaactgttgcagacactcaggtgtgggaggcgtgggagcgggtgcctgtgtctgtggtttcaggtatgatttccctgagagc

SEQ ID NO: 557443 - DNA, 201 bp, Homo sapiens
aggggcgccgtccacagcacccccaaaggtgagtgtgtggggcacattgggccaggctgggctgtggacagcgggctcggggcaggccttggctatggctrggtcccttcctcccaggatatgcccagcagcactgcagccacatgaaaggacagcctggggtggggggactctggttgggctcccccacagcctctggag

SEQ ID NO: 557444 - DNA, 201 bp, Homo sapiens
gatggggtgggagctgaggaaaaatgggacccggccaggggcgccgtccacagcacccccaaaggtgagtgtgtggggcacattgggccaggctgggctgkggacagcgggctcggggcaggccttggctatggctgggtcccttcctcccaggatatgcccagcagcactgcagccacatgaaaggacagcctggggtgg

SEQ ID NO: 557445 - DNA, 201 bp, Homo sapiens
cccggccaggggcgccgtccacagcacccccaaaggtgagtgtgtggggcacattgggccaggctgggctgtggacagcgggctcggggcaggccttggcyatggctgggtcccttcctcccaggatatgcccagcagcactgcagccacatgaaaggacagcctggggtggggggactctggttgggctcccccacagcc

SEQ ID NO: 557446 - DNA, 201 bp, Homo sapiens
aataaagtcacctacccgccgccgctgacgctgacggagcagacgctgaagggccggctccgggagaagctggccgactgtgagcagagccccacatcctygcgcacgtcttccctgggctctggcggccccgactgcgccatcacagtcaagagccctgggagggagccggggcgtgaccacctcaacggggtggccatg

SEQ ID NO: 557447 - DNA, 201 bp, Homo sapiens
cgcactcaaggtcagggtgaaggacggctgtgatgtggacgacccctgtacctcgagcccctgtccccccaatagccgctgccacgacgcctgggaggacyacagctgcgtctgtgacaaaggtgggaccgccctcccggggcccttcagtgacagggaggtctcttatggctgaaacacaggaggggggctcagtttaga

SEQ ID NO: 557448 - DNA, 201 bp, Homo sapiens
gtgacaaaggtgggaccgccctcccggggcccttcagtgacagggaggtctcttatggctgaaacacaggaggggggctcagtttagacattagcgtcccyagccaactccctgtggttccgtggagccctgagctttattttataacaagcgggcccctcctagagagagactctgagcctcttccttactcaaggcaca

SEQ ID NO: 557449 - DNA, 201 bp, Homo sapiens
cggggactctgtggcactcttcctcttccctctgctgagtaccagggaaagtcagatcttctggaggggacaggttgctccagatattttaacgtggaagktctcgtggattgtgggtggaggtaatgctggctctgtccttgcagggtaccttggaataaactgtgtggatgcctgtcacctgaacccctgcgagaacat

SEQ ID NO: 557450 - DNA, 201 bp, Homo sapiens
tgccactgtgccgtcagcaaaggctttgatcccgactgtaataagaccaacggccagtgccaatgcaaggtgaggccccgcccccatgatccctgcatgcygtgtttgctcacacacatgcacagctgcccctaaatacacacacgccttcacataccctgtcggtacacactcacacccctgcacacacacctgtgccca

SEQ ID NO: 557451 - DNA, 201 bp, Homo sapiens
agtgccctctcccctgggtggaagacctagacccatcccacctgaatgtccccactcaactctatcctccctggacaaggctgtttccaggctgtgcccamccccatggcccctggagaaaagcaactactgaggcctggagggcacaggggagccccgcctgcccgacagtggcactgtcttcttggcatgtgctgggcc

SEQ ID NO: 557452 - DNA, 201 bp, Homo sapiens
agctcctagcccaggacacctgtctgccctgcgactgcttcccccatggctcccacagccgcacttgcgacatggccaccgggcagtgtgcctgcaagccyggcgtcatcggccgccagtgcaaccgctgcgacaacccgtttgccgaggtcaccacgctcggctgtgaaggtccgcgttgcccctcgacaccctgcaggt

SEQ ID NO: 557453 - DNA, 201 bp, Homo sapiens
atggattcctggtgcatgggatcgtggctgccggcagatggtgttgctgatttctttcctcacggacttgctcggaagtgctggctcctgttggctgggckcccgaaacgcctggttgtcagtgtcagagcagcttcggccgtggccctgacatgaaagaggggcgctggtgtcgacctcctggcccccatggggttctaa

SEQ ID NO: 557454 - DNA, 201 bp, Homo sapiens
agttttgccttgtatcccaggctggagtgcagtggcacgatctcagctcactgcaacctccacatcctgggttcaagtgattctcctgcctcggctcccargtagctgagattgcaggcacacaccaccatgctcggctaattttgtatttttagtagagaaggggtttcaccatgttggtcaggctggttttgaactcct

SEQ ID NO: 557455 - DNA, 201 bp, Homo sapiens
aaaatgagctggatacagtggtttatgcctgtaatcccagctactcaggaggctgagacaagagaaccgcttgaaccagaaggtggaggttgcagtgagcygagactgtgccactgcactccgacctgggcaacagagcgagactccatctcaaaaaaaaccacaaaagcttattccttctgtgtctttgtttgtacccct

SEQ ID NO: 557456 - DNA, 201 bp, Homo sapiens
agttggtgaagtcggcggccactgcctttacttaccctgcatctcggactcaggatgttcctgcctccttgagcccaagtgatgggggcatagaagccgayagaggggtcttcaggtggctagcgagctctgccagaaaggtggtgcagggccctgcttgcaggcgctgtggcaggtgggggctgccccgatgctgctatg

SEQ ID NO: 557457 - DNA, 201 bp, Homo sapiens
ggtgcagggccctgcttgcaggcgctgtggcaggtgggggctgccccgatgctgctatgtgatgtgacagataagtcacttggtttccgttcccaaacacrggcctggtcaggtggtagaaagtcacctgctatggaaacgtggtgattctcggaggcaagcgccgccccaccctgggcctttgtgttacagaaccctgtt

SEQ ID NO: 557458 - DNA, 201 bp, Homo sapiens
ggtttttaacagaacgtgtatttattaatgttcaaaacactggaattacaaatgagaagagtctacaataaattaagatttttgaatttgtacttctgcgrtgctggtttttctccacaaacacccccgcccctccccatgcccagggtggccgtggaagggacggtttacggacgtgcagctgagctgtccgtgtcccat

SEQ ID NO: 557459 - DNA, 201 bp, Homo sapiens
atttgagtgtgggtgagcatatgtgggtgtgaatgtgggtatgtacgagtgtgggtaggtgtgcacatgtgagtatgaatgagtgcacgtgtgggtgaggrcacatttgagtgggtgagtgtatatgtgagtgtgaatgtggatgagtatgcacgagtgtgggtaggtgtgcacatgtgagtatgagcgcacgtgtgggtg

SEQ ID NO: 557460 - DNA, 201 bp, Homo sapiens
ggacactgctgtcctgtgagccccccgccggccttgggcccgcccagctggactctgagttgagaatgaggatgatagtaatatcagccacgccagctcakacactgcacagtttcagatccgtcctttcatttcattcccaaacagccctagagatagcagctatgcacttaccccctttctagaagagtctgcctaggc

SEQ ID NO: 557461 - DNA, 201 bp, Homo sapiens
ggtgctgaaggaggaagggtcaaggtggtggtcatgggtggggaatggggagtggggatgcccaggctctcttctcctttgccaagcatgcctgaggctgmtcctgggatggggcctataggacctgtgactcccgcagcatctgaatgaccctgactttccttgtgtctgcagatggcatccacagcgtcacggccttct

SEQ ID NO: 557462 - DNA, 201 bp, Homo sapiens
agcgcacacagccagacctcccccagcctgttctggggggtgaccaagttcatctgtgccgttggctttttcatgggtagaggggactgtgcaagcacccmccacctctggctttgtcagatgagtcaggagccctagggtaacgtctaacgtggctttgagacctgcatcggccttccaggccgccagtccaggctgcag

SEQ ID NO: 557463 - DNA, 201 bp, Homo sapiens
cctccgtgacacttgctggcctcaactgcagagtggacggttagcctgcgcgttaaacccacactcgccgagaggcgggagagtggacggttagcctgcgygtttaacccacactcgccgagaggcgggagagtggacggttagcctgcgcgttaaacccacactcgccgagaggcgggcattttaaaccagagcctcact

SEQ ID NO: 557464 - DNA, 201 bp, Homo sapiens
cgtgacacttgctggcctcaactgcagagtggacggttagcctgcgcgttaaacccacactcgccgagaggcgggagagtggacggttagcctgcgtgttwaacccacactcgccgagaggcgggagagtggacggttagcctgcgcgttaaacccacactcgccgagaggcgggcattttaaaccagagcctcactcagc

SEQ ID NO: 557465 - DNA, 201 bp, Homo sapiens
gccggtgggtgtctctgggagtcagaatcgagcagcacatcctgggcgctgtctatcagagaccgtttcctaaacgccctgtgcctgctgctctgattcaygaaggccagactgaagtcaggtgtcctagcagtgggtgtctcacatgagtcagtgccactcgaaaaacaagcgtggattgcattggctttgtcttttgcc

SEQ ID NO: 557466 - DNA, 201 bp, Homo sapiens
tcctcttgcttcggcttcccaaagtgctgagattacaggcgtgagccaccgcgcccggctgaaaacaagatctttaaagaggtatttgtacacccatgttyatagcagtgttattcacagtaaccaaaaggtggaagcaacccaggtgtctgtgaacagacgaatggataagcaacatgtggttcagttgcatgatggaat

SEQ ID NO: 557467 - DNA, 201 bp, Homo sapiens
ccgagtagctgggactacaggtgcccgccaccatgcccagctaattttttgaatttttagtagagacgggatttcactgtgtgttaggcaggatggtctcsatctcctgacctcatgatcctcttgcttcggcttcccaaagtgctgagattacaggcgtgagccaccgcgcccggctgaaaacaagatctttaaagaggt

SEQ ID NO: 557468 - DNA, 201 bp, Homo sapiens
ctcgctctgtcgcccaggctggagtgcagtggcgcgatctcggctcactgcaagctccgcctcccgggttcatgccattctcctgcctcagcctcccgagyagctgggactacaggtgcccgccaccatgcccagctaattttttgaatttttagtagagacgggatttcactgtgtgttaggcaggatggtctccatctc

SEQ ID NO: 557469 - DNA, 201 bp, Homo sapiens
gtattcttccctccctccctccttccaactatccatccacccatcaagatttttctttctttttattttatttatttatttatttatttatttatttattwgagacagagtctcactctggcacccaggctggagtgcagtggtgcaatctcagcccactgcaacctccgcctcacaagttcaagcgattctcgtgcctct

SEQ ID NO: 557470 - DNA, 201 bp, Homo sapiens
ttagtggggtcatccctctagcgcctgttctcttgtcctggatgaaggccaggggctcttaaaaagcaaacaaaacacacagacagacagacacacacacrcacacacacacacacacacgcacacaacgggggtgggggccgttttcaaggtcatcgtgtggggtaacacctttccttccagccgcccgacacaccgact

SEQ ID NO: 557471 - DNA, 201 bp, Homo sapiens
acagcagccttttagtggggtcatccctctagcgcctgttctcttgtcctggatgaaggccaggggctcttaaaaagcaaacaaaacacacagacagacasacacacacacacacacacacacacacacacgcacacaacgggggtgggggccgttttcaaggtcatcgtgtggggtaacacctttccttccagccgcccg

SEQ ID NO: 557472 - DNA, 201 bp, Homo sapiens
cacagcagccttttagtggggtcatccctctagcgcctgttctcttgtcctggatgaaggccaggggctcttaaaaagcaaacaaaacacacagacagacrgacacacacacacacacacacacacacacacgcacacaacgggggtgggggccgttttcaaggtcatcgtgtggggtaacacctttccttccagccgccc

SEQ ID NO: 557473 - DNA, 201 bp, Homo sapiens
ccccacagcagccttttagtggggtcatccctctagcgcctgttctcttgtcctggatgaaggccaggggctcttaaaaagcaaacaaaacacacagacasacagacacacacacacacacacacacacacacacgcacacaacgggggtgggggccgttttcaaggtcatcgtgtggggtaacacctttccttccagccg

SEQ ID NO: 557474 - DNA, 201 bp, Homo sapiens
aaagccccacagcagccttttagtggggtcatccctctagcgcctgttctcttgtcctggatgaaggccaggggctcttaaaaagcaaacaaaacacacasacagacagacacacacacacacacacacacacacacacgcacacaacgggggtgggggccgttttcaaggtcatcgtgtggggtaacacctttccttcca

SEQ ID NO: 557475 - DNA, 201 bp, Homo sapiens
tggccgactgtgagcagagccccacatcctcgcgcacgtcttccctgggctctggcggccccgactgcgccatcacagtcaagagccctgggagggagccrgggcgtgaccacctcaacggggtggccatgaatgtgcgcactgggagcgcccaggccgatggctccgactctgagtgagtagcctgggcctccagggcgg

SEQ ID NO: 557476 - DNA, 201 bp, Homo sapiens
acctgaacacacgggttcatataaatgccccaaattccctagaatgaaattccttaatgctgggaggggttgtagtaaacaaccctcttttttttttttttgagacagagttttgcttttgttgcccaggctggagtgcaatggtgcgatctcagctcactgcaacctctgtcccctgggttcaagcgattgtcctgcctc

SEQ ID NO: 557477 - DNA, 201 bp, Homo sapiens
acagacgtggcctcctggcctagccctgggacccggggaaccaggaggaaggacaggggctgaggctggctcagctgcacacggcccagcagctgcccccrgcagcatcacccggacttgaccttgccgtgtctcctcctcccaggcatcttgaaaaataaagtcacctacccgccgccgctgacgctgacggagcagacg

SEQ ID NO: 557478 - DNA, 201 bp, Homo sapiens
gctgcccccggcagcatcacccggacttgaccttgccgtgtctcctcctcccaggcatcttgaaaaataaagtcacctacccgccgccgctgacgctgacrgagcagacgctgaagggccggctccgggagaagctggccgactgtgagcagagccccacatcctcgcgcacgtcttccctgggctctggcggccccgact

SEQ ID NO: 557479 - DNA, 201 bp, Homo sapiens
cagggcttcgacctggcagccacgcaggacgccgactttcacgaggtaggcgggtggccgccaccctggctcggggacactcggggacactcggatgcccrtgggtgggtgctgtggggctgggcgtctacctcagttcgtggaagacggttgtgtccaggatccccatcctcatttctcaaatgtgagccctggcgggtg

SEQ ID NO: 557480 - DNA, 201 bp, Homo sapiens
tttttaaagttcctttctgacaaggaaacttgcaccagacagtagtgagttgctgagtaacagcagggactgaaagcggccgaagtgggtttgcacacatyacgactgcctccctgttccagaatgagaagctgagccgcaatgagacgcaggtggacggcgccagggccctgcagctggtgagggcgctgcgcagtgcta

SEQ ID NO: 557481 - DNA, 201 bp, Homo sapiens
gttgctgagtaacagcagggactgaaagcggccgaagtgggtttgcacacatcacgactgcctccctgttccagaatgagaagctgagccgcaatgagackcaggtggacggcgccagggccctgcagctggtgagggcgctgcgcagtgctacacagcacacgggcacgctctttggcaatgacgtgcgcacggcctacc

SEQ ID NO: 557482 - DNA, 201 bp, Homo sapiens
tgagtgctgtctgtctgaccaggacgtcatccactcgggcagcgccctcctggccccagccaccagggcggcgtgggagcagatccagcggagcgagggcrgcacggcacagctgctccggcgcctcgagggctacttcagcaacgtggcacgcaacgtgcggcggacgtacctgcggcccttcgtcatcgtcaccgccaa

SEQ ID NO: 557483 - DNA, 201 bp, Homo sapiens
gacgtcatccactcgggcagcgccctcctggccccagccaccagggcggcgtgggagcagatccagcggagcgagggcggcacggcacagctgctccggcrcctcgagggctacttcagcaacgtggcacgcaacgtgcggcggacgtacctgcggcccttcgtcatcgtcaccgccaacatgagtaaggcgctggctgcg

SEQ ID NO: 557484 - DNA, 201 bp, Homo sapiens
ttggccccacaggtttgccactcaggaaaggaacggcttgcttctctacaacggccgcttcaatgagaagcacgacttcatcgccctggagatcgtggacragcaggtgcagctcaccttctctgcaggtggggccttctccccaggaagggcagctctgagcaattcacagatactttgtgggttaaaacgaccctcgcc

SEQ ID NO: 557485 - DNA, 201 bp, Homo sapiens
caacatgagtaaggcgctggctgcgttgggggtggaaccctgctaccatcaggggtgtgccccagagctaggcccccatggggtgaagcaggtgggctccyggcccccccttggccatgctcttagaaaaatgattgtgaggccgggcacagtggctcatacctgtaatcccagcactttgggagatcgggacaggcagac

SEQ ID NO: 557486 - DNA, 201 bp, Homo sapiens
ccaggtaaccatcttggacattaatgacaatgcccccatgtttgagaaggacgaactggagctgtttgttgaggagaacaacccagtggggtcggtggtgkcaaagattcgtgctaacgaccctgatgaaggccctaatgcccagatcatgtatcagattgtggaaggggacatgcggcatttcttccagctggacctgct

SEQ ID NO: 557487 - DNA, 201 bp, Homo sapiens
agaaaatggatggagtggtgggcgcctcccaccatggtgccgtggggaggggagggaggacgtggccatgtgcacctgtctccccctgatgcctcacagcrcaatcctcggtccccagtaggccccgccaacccctgttttctctctgggtctccctcccaccatgcaggcgagacaacaacgaccgtggcaccgaaggtt

SEQ ID NO: 557488 - DNA, 201 bp, Homo sapiens
ggaccagaatgacaacccgcctgtgctgcccgacttccagatcctcttcaacaactatgtcaccaacaagtccaacagtttccccaccggcgtgatcggcygcatcccggcccatgaccccgacgtgtcagacagcctcaactacaccttcgtgcagggcaacgagctgcgcctgttgctgctggaccccgccacgggcga

SEQ ID NO: 557489 - DNA, 201 bp, Homo sapiens
gcgagaccaaggagacgcacgtcctcagggtgaaagccgtggactacagtacgccgccgcgctcggccaccacctacatcactgtcttggtcaaagacacyaacgaccacagcccggtcttcgagcagtcggagtaccgcgagcgcgtgcgggagaacctggaggtgggctacgaggtgctgaccatccgcgccagcgacc

SEQ ID NO: 557490 - DNA, 201 bp, Homo sapiens
ggatttcgaggatgtccagaaatactcgctgagcattaaggcccaggatgggggccggcccccgctcatcaattcttcaggggtggtgtctgtgcaggtgstggatgtcaacgacaacgagcctatctttgtgagcagccccttccaggccacggtgctggagaatgtgcccctgggctaccccgtggtgcacattcaggc

SEQ ID NO: 557491 - DNA, 201 bp, Homo sapiens
gattaccagcagcagtttacagcaactgcagttttgtaaacagtagcttaatgtcatgaaagccttcccagtgtaaatgctacttacgcccttcctccagyagtctcacgcccagccccaaaaatgtaaattataagttgtaaagataaggtggggctcacaaagtgaggggaggttctcctttccctgggatcgcatctc

SEQ ID NO: 557492 - DNA, 201 bp, Homo sapiens
cagcaactgcagttttgtaaacagtagcttaatgtcatgaaagccttcccagtgtaaatgctacttacgcccttcctccagtagtctcacgcccagccccmaaaatgtaaattataagttgtaaagataaggtggggctcacaaagtgaggggaggttctcctttccctgggatcgcatctcacatttaagcgtcccataa

SEQ ID NO: 557493 - DNA, 201 bp, Homo sapiens
tccctgaaatccattttggccttagagaagtccaaggccccagggtctgtggattcccctgatctttgcagggaaaggagggctgccacccgctcacggcrttgggactgtggttggggtctgcagccatcccattctccgaaagggacgagggcaggaagccttaaggctccggcatcttagatgtgcctgggatggcct

SEQ ID NO: 557494 - DNA, 201 bp, Homo sapiens
tcctgtccatggttggggcaccttccctctgaccttctagaataagtctccctaagtatgtgtcaagagtggccaggccgaccccagggttgtgatggccrgcttgcagaccccgagacggtctccagccccatctccacggatcactggctttgtccccgcaaattctggtacctgggactccaggactctgttaagtga

SEQ ID NO: 557495 - DNA, 201 bp, Homo sapiens
agagaagtccaaggccccagggtctgtggattcccctgatctttgcagggaaaggagggctgccacccgctcacggcgttgggactgtggttggggtctgyagccatcccattctccgaaagggacgagggcaggaagccttaaggctccggcatcttagatgtgcctgggatggcctcccagtttctccgctctgcagag

SEQ ID NO: 557496 - DNA, 201 bp, Homo sapiens
ctgtccatggttggggcaccttccctctgaccttctagaataagtctccctaagtatgtgtcaagagtggccaggccgaccccagggttgtgatggccagyttgcagaccccgagacggtctccagccccatctccacggatcactggctttgtccccgcaaattctggtacctgggactccaggactctgttaagtgaag

SEQ ID NO: 557497 - DNA, 201 bp, Homo sapiens
ctctgaccttctagaataagtctccctaagtatgtgtcaagagtggccaggccgaccccagggttgtgatggccagcttgcagaccccgagacggtctccrgccccatctccacggatcactggctttgtccccgcaaattctggtacctgggactccaggactctgttaagtgaagcactgtgtcagccagctggtccca

SEQ ID NO: 557498 - DNA, 201 bp, Homo sapiens
attgctcaggctctgacttggctcctgtgggtccagacacagggccctgttccgtctcccctctgcacctgccatcccttcatctgaaatgtgtctcctcsccatccatctgcccatcatgggcctccctcaaaatctgcttccgcagctgtacacctgctctgagaaggttctggaagtttcccgacctcctcagatgga

SEQ ID NO: 557499 - DNA, 201 bp, Homo sapiens
gtccattccgtcctggtttcccacgccacgtctggcgccggggaccccgggcggttcctccgagtcaggctctgccgcacgctctgtgttgccaggctgcrctgctcggaggaacttctgcgatgggaggcggtgtcagaatggaggcacctgtgtcaacaggtggaatatgtatctgtgtgagtgtccactccgattcgg

SEQ ID NO: 557500 - DNA, 201 bp, Homo sapiens
tgaaatgtgtctcctccccatccatctgcccatcatgggcctccctcaaaatctgcttccgcagctgtacacctgctctgagaaggttctggaagtttccygacctcctcagatggatcataggtttcctcccttgaagcttcctgggtgccttgctgatgcttttgttggtccacccccatgctgggtgtggttcacaca

SEQ ID NO: 557501 - DNA, 201 bp, Homo sapiens
agttctgtatagccaagattggcatgagggttggcgggtggacagagggactgcccagcacatgccctccccatcatgagtgcctggttggagtgtggcgrgggcaggaccgagagtgctcccagcaggctggtggaggtcagtccctcagcagatcagcgagggctcaggagatgggtcggggctgtggggcaggggctc

SEQ ID NO: 557502 - DNA, 201 bp, Homo sapiens
gcctgtggccgcccctttccgggagctcagaggagcaaagtccccgtgcaggacgccacctgcactgtcccggaggagaggggcctcatgtaagaagatamacagaggacggtggattaccgggatccatggcttccgtgtctagggccgggtcctgtcagcggtgcctgagcacagcctcccgtgtgggattaggccttt

SEQ ID NO: 557503 - DNA, 201 bp, Homo sapiens
atttatttgagacagagtctcactctggcacccaggctggagtgcagtggtgcaatctcagcccactgcaacctccgcctcacaagttcaagcgattctcrtgcctctgccccttgggtatctggactacaggtgcccgctaccacacccagctaatttttgtatttttagtagagatggggtttcaccactttggccagg

SEQ ID NO: 557504 - DNA, 201 bp, Homo sapiens
tccgcagctgtacacctgctctgagaaggttctggaagtttcccgacctcctcagatggatcataggtttcctcccttgaagcttcctgggtgccttgctkatgcttttgttggtccacccccatgctgggtgtggttcacacacttccatgtctctgtcccccaggatggcagggactgtagctaatgggtgtgggtgtg

SEQ ID NO: 557505 - DNA, 201 bp, Homo sapiens
tggccaaggatagccagataggccagcggaatggaagagagagcccagaaaacaggctcaacatatttaacagtgtagccagtcaagtcacaaggaataamgaaatcatagagctgaattgtcctccgcgagggtagattgtgtgtctgcctttttttctgaatctgtttcattcttaatattcttttttgacctgttttc

SEQ ID NO: 557506 - DNA, 201 bp, Homo sapiens
tattttcctggttaaaatcagtgtggcctttgcgtattgggccagaacaaacacatccatgtgtggtttaagataaaagcatgtttcataacaactgccaygaggaagtaaacagtaccctatctgtattattgtagtggaccctaaaaaaaaaaaagtcaaacaggcacaaaaaaatagctcacatgaaaaaatgaagtc

SEQ ID NO: 557507 - DNA, 201 bp, Homo sapiens
ctcccaccatggtgccgtggggaggggagggaggacgtggccatgtgcacctgtctccccctgatgcctcacagcgcaatcctcggtccccagtaggcccygccaacccctgttttctctctgggtctccctcccaccatgcaggcgagacaacaacgaccgtggcaccgaaggttcccagtggtgtgagtgacgggcggt

SEQ ID NO: 557508 - DNA, 201 bp, Homo sapiens
gcaggtgctggatgtcaacgacaacgagcctatctttgtgagcagccccttccaggccacggtgctggagaatgtgcccctgggctaccccgtggtgcacrttcaggcggtggacgcggactctggagagaacgcccggctgcactatcgcctggtggacacggcctccacctttctggggggcggcagcgctgggcctaa

SEQ ID NO: 557509 - DNA, 201 bp, Homo sapiens
acgacaacgagcctatctttgtgagcagccccttccaggccacggtgctggagaatgtgcccctgggctaccccgtggtgcacattcaggcggtggacgcrgactctggagagaacgcccggctgcactatcgcctggtggacacggcctccacctttctggggggcggcagcgctgggcctaagaatcctgcccccaccc

SEQ ID NO: 557510 - DNA, 201 bp, Homo sapiens
tgctggagaatgtgcccctgggctaccccgtggtgcacattcaggcggtggacgcggactctggagagaacgcccggctgcactatcgcctggtggacacrgcctccacctttctggggggcggcagcgctgggcctaagaatcctgcccccacccctgacttccccttccagatccacaacagctccggttggatcacag

SEQ ID NO: 557511 - DNA, 201 bp, Homo sapiens
tgcacctgtctccccctgatgcctcacagcgcaatcctcggtccccagtaggccccgccaacccctgttttctctctgggtctccctcccaccatgcaggygagacaacaacgaccgtggcaccgaaggttcccagtggtgtgagtgacgggcggtggcactctgtgcaggtgcagtactacaacaaggtaagatgggccc

SEQ ID NO: 557512 - DNA, 201 bp, Homo sapiens
gcgcaatcctcggtccccagtaggccccgccaacccctgttttctctctgggtctccctcccaccatgcaggcgagacaacaacgaccgtggcaccgaagkttcccagtggtgtgagtgacgggcggtggcactctgtgcaggtgcagtactacaacaaggtaagatgggccccaccacttccccctggccccagggcggc

SEQ ID NO: 557513 - DNA, 201 bp, Homo sapiens
gcatcctccaggtctctgccacggaccgggactcaggtcccaatgggcgtctgctgtacaccttccagggtggggacgacggcgatggggacttctacatygagcccacgtccggtgtgattcgcacccagcgccggctggaccgggagaatgtggccgtgtacaacctttgggctctggctgtggatcggggcagtccca

SEQ ID NO: 557514 - DNA, 201 bp, Homo sapiens
gagcccacgtccggtgtgattcgcacccagcgccggctggaccgggagaatgtggccgtgtacaacctttgggctctggctgtggatcggggcagtcccaytccccttagcgcctcggtagaaatccaggtaaccatcttggacattaatgacaatgcccccatgtttgagaaggacgaactggagctgtttgttgaggag

SEQ ID NO: 557515 - DNA, 201 bp, Homo sapiens
taggccccgccaacccctgttttctctctgggtctccctcccaccatgcaggcgagacaacaacgaccgtggcaccgaaggttcccagtggtgtgagtgaygggcggtggcactctgtgcaggtgcagtactacaacaaggtaagatgggccccaccacttccccctggccccagggcggctcgagaaggtgccctggggc

SEQ ID NO: 557516 - DNA, 201 bp, Homo sapiens
cttcagaccacctgaagaaaaaggtaaaaccgcttagaaacctgctgctgccctcggagtccccagcgttcagggaggggagggccccgctgcgggcatcrcaggacctgcgcactgaagatctgggccagagtgttccgagtgctctctggtgccaggtcctgttggtgacagcaggttgttttgttcaagtgctcaggt

SEQ ID NO: 557517 - DNA, 201 bp, Homo sapiens
tcccagccgacttcttcagaccacctgaagaaaaaggtaaaaccgcttagaaacctgctgctgccctcggagtccccagcgttcagggaggggagggcccygctgcgggcatcgcaggacctgcgcactgaagatctgggccagagtgttccgagtgctctctggtgccaggtcctgttggtgacagcaggttgttttgtt

SEQ ID NO: 557518 - DNA, 201 bp, Homo sapiens
tccgtctccttcccagccgacttcttcagaccacctgaagaaaaaggtaaaaccgcttagaaacctgctgctgccctcggagtccccagcgttcagggagrggagggccccgctgcgggcatcgcaggacctgcgcactgaagatctgggccagagtgttccgagtgctctctggtgccaggtcctgttggtgacagcagg

SEQ ID NO: 557519 - DNA, 201 bp, Homo sapiens
ctgcgagactccacctcaaaaataaataaataaatatggccagccagcgtcagtgtgacagttgtggtcattttgaaaacagcaggggttcaagaaagccstgggagttatgtctgattaaaggaactgtccccccagttcttgctgtcgacatctttgacaagttcaactttacgggagccagggtcccgcgattcgaca

SEQ ID NO: 557520 - DNA, 201 bp, Homo sapiens
gtcgctctggtcatcatttaccgcaccctggggcagctcctgcccgagcgctacgaccccgaccgtcgcagcctccggtaaggcctgggcacggggcacayggggagggcccgttctggaggctcctgaggcttccacaggtcaaaatcctgatcctgatcaagcacaggtcttcacagtgacatttcaccgtgaccctgg

SEQ ID NO: 557521 - DNA, 201 bp, Homo sapiens
ccgccaccacgcccggctgatttttttgtatttttagtagagacagggtttcaccgtgttaaccaggatggcctcgatctcctgacctcgtgatccgccckcctcggcctcccaaagtgctgggattacaggcgtgagccaccgcgtctggcctcattcttttttatagtggaatagtacaccatggtatatatgtaccac

SEQ ID NO: 557522 - DNA, 201 bp, Homo sapiens
ttacaggcgtgagccaccgcgtctggcctcattcttttttatagtggaatagtacaccatggtatatatgtaccacatttcttttctccagtcatctgttrccgggccacgtcatttttaattcactttgagtgtgtgtccgtgggtgcagggctgtaggcctcttgttgcagaatgcggagcttgggagaaaggcgatgt

SEQ ID NO: 557523 - DNA, 201 bp, Homo sapiens
ccggctgggcacggtggctcacatctgtaatcccagcactttgggaggccgaggcacgtggatcacgaggtcaggagattgagaccatcctggccaacacrgtgaaaccttgtctctactaaaaatacaaaaaaccaggtgtggtggcacacgcctgtagtcccagctacttgggaggctgaagcaggagaatcgcttgaa

SEQ ID NO: 557524 - DNA, 201 bp, Homo sapiens
tactccagcctgggtgacagaataacaccctgtctaaaaaaaaaaaaaaagagagagagagaatagagactatgtttcctttctgctagttcacaagaaaracttttaaaaagttactttctcacggctgggcgtggtggctcacacctgtaatcccagcactttgggaggccgaagtgggcagatcacaaggtcaggagt

SEQ ID NO: 557525 - DNA, 201 bp, Homo sapiens
acgacatgctgaccaacagcatcactgtccgcctggagaacatgtcccaggagaagttcctgtccccgctgctggccctcttcgtggagggggtggccgcsgtgctgtccaccaccaaggacgacgtcttcgtcttcaacgtccagaacgacaccgacgtcagctccaacatcctgaacgtgaccttctcggcgctgctgc

SEQ ID NO: 557526 - DNA, 201 bp, Homo sapiens
acgtgcggcggacgtacctgcggcccttcgtcatcgtcaccgccaacatgagtaaggcgctggctgcgttgggggtggaaccctgctaccatcaggggtgygccccagagctaggcccccatggggtgaagcaggtgggctcccggcccccccttggccatgctcttagaaaaatgattgtgaggccgggcacagtggctc

SEQ ID NO: 557527 - DNA, 201 bp, Homo sapiens
agatggccgtggtgacagtggatgattgtgacacaaccatggctgtgcgctttggaaaggacatcgggaactacagctgcgctgcccagggcactcagacyggctccaagaagtgagcatcccaggaggggaggccctgggggtccgtacccccaaacatgctcaccctgcggccttcccagggcagggccccacgtaggc

SEQ ID NO: 557528 - DNA, 201 bp, Homo sapiens
cagcccgccgtggccgcctctccccgccctgacgtcacagaagatggctttacctacccaggtccctggatctgaccggccctctactcctggggggtgtycccaacctgccagaagacttcccagtgcacaaccggcagttcgtgggctgcatgcggaacctgtcagtcgacggcaaaaatgtggacatggccggattca

SEQ ID NO: 557529 - DNA, 201 bp, Homo sapiens
tgccagagtcctcaccttctgctcacattgcagaaggccccctgctgaggccggctggccggaggaccaccccgcagaccacgcgcccggggcctggcacygagagggaggccccgatcagcaggcggaggcgacaccctgatgacgctggccagttcgccgtcgctctggtcatcatttaccgcaccctggggcagctcc

SEQ ID NO: 557530 - DNA, 201 bp, Homo sapiens
cggtgtcagaatggaggcacctgtgtcaacaggtggaatatgtatctgtgtgagtgtccactccgattcggcgggaagaactgtgagcaaggtgagtggcyggcgtcgtccatccccccggtcacggcggcctgggaggcattgctccttgatgtgcccgggaccaccgtgagggggcttcacatccaggtccggcagcct

SEQ ID NO: 557531 - DNA, 201 bp, Homo sapiens
cacaggtgctcctgccagagtcctcaccttctgctcacattgcagaaggccccctgctgaggccggctggccggaggaccaccccgcagaccacgcgcccrgggcctggcaccgagagggaggccccgatcagcaggcggaggcgacaccctgatgacgctggccagttcgccgtcgctctggtcatcatttaccgcaccc

SEQ ID NO: 557532 - DNA, 201 bp, Homo sapiens
ggaacacaggtgctcctgccagagtcctcaccttctgctcacattgcagaaggccccctgctgaggccggctggccggaggaccaccccgcagaccacgcscccggggcctggcaccgagagggaggccccgatcagcaggcggaggcgacaccctgatgacgctggccagttcgccgtcgctctggtcatcatttaccgc

SEQ ID NO: 557533 - DNA, 201 bp, Homo sapiens
tctgttggtttttgagaagcacctgctggcactgacggcagtcttggggaacacaggtgctcctgccagagtcctcaccttctgctcacattgcagaaggycccctgctgaggccggctggccggaggaccaccccgcagaccacgcgcccggggcctggcaccgagagggaggccccgatcagcaggcggaggcgacacc

SEQ ID NO: 557534 - DNA, 201 bp, Homo sapiens
tcacccggacttgaccttgccgtgtctcctcctcccaggcatcttgaaaaataaagtcacctacccgccgccgctgacgctgacggagcagacgctgaagrgccggctccgggagaagctggccgactgtgagcagagccccacatcctcgcgcacgtcttccctgggctctggcggccccgactgcgccatcacagtcaa

SEQ ID NO: 557535 - DNA, 201 bp, Homo sapiens
taaatttctgaagtcccaatttgacccaaaggtgacacctctctctgtgtgccctgtcagtgataaaacctgctctagggatgaagatactgtggggtccktgggtccgagctctcggagtgtgattctgtctcccctagaaacacatcatggcgtgtcctcagggcatttgtgcgcgggatttaagcagatgtttcctca

SEQ ID NO: 557536 - DNA, 201 bp, Homo sapiens
ctggcccagccagctaacccgaggcgcacatgatcctagggtcttgcatatgtgtcaccaggtgaccgggccggctgccgtgatggcctggcgtcccagcrtctccaaatgtggtcagtgcgttcagcaccttcttagttcccatgttcctgccgttgccaggggcgttcagacctggtctgacttctgtccagccccggg

SEQ ID NO: 557537 - DNA, 201 bp, Homo sapiens
cccccgcccctgcagccaagtccgcggccgtgtgatttcgggagacacctgaggtccctgggcctgtgtccgcagccatgcctcacccccagctcttcagyggtgagagcgtcgtgtcctggagtgacctgaacatcatcatctctgtgccctggtacctggggctcatgttccggacccggaaggaggacagcgttctga

SEQ ID NO: 557538 - DNA, 201 bp, Homo sapiens
ccaatttgacccaaaggtgacacctctctctgtgtgccctgtcagtgataaaacctgctctagggatgaagatactgtggggtccgtgggtccgagctctyggagtgtgattctgtctcccctagaaacacatcatggcgtgtcctcagggcatttgtgcgcgggatttaagcagatgtttcctcaccgtgtttgtcccca

SEQ ID NO: 557539 - DNA, 201 bp, Homo sapiens
gctccgggagaagctggccgactgtgagcagagccccacatcctcgcgcacgtcttccctgggctctggcggccccgactgcgccatcacagtcaagagcsctgggagggagccggggcgtgaccacctcaacggggtggccatgaatgtgcgcactgggagcgcccaggccgatggctccgactctgagtgagtagcctg

SEQ ID NO: 557540 - DNA, 201 bp, Homo sapiens
cccctagaaacacatcatggcgtgtcctcagggcatttgtgcgcgggatttaagcagatgtttcctcaccgtgtttgtccccatgctctggcttcttgacytcaggttgcctcaccggcccatcattaataccccgatggtgagcacgctggtgtacagcgagggggctccgctcccgagacccctggagaggcccgtcct

SEQ ID NO: 557541 - DNA, 201 bp, Homo sapiens
ccggacccggaaggaggacagcgttctgatggaggccaccagtggtgggcccaccagctttcgcctccaggtgactggggccccgtgccaccaaggcacckgctaggtgggtgcccgagggagggacccaggcgctgggcttcctggtgcacactcgggcacctgctactcgcccttcctccggcgcccgcccctggggtt

SEQ ID NO: 557542 - DNA, 201 bp, Homo sapiens
ttattttggtgtcttttgctggacactgaaaccatcccctgtgattctgccattagctattatgggctgtgacatctttgcacctgtgccttctctttctktttaaatttctgaagtcccaatttgacccaaaggtgacacctctctctgtgtgccctgtcagtgataaaacctgctctagggatgaagatactgtggggt

SEQ ID NO: 557543 - DNA, 201 bp, Homo sapiens
tgagcacctttgcctggaccctcgtggagagcctgcatgtctaccgcatgctgaccgaggtgcgcaacatcgacacggggcccatgcggttctactacgtygtgggctggggcatcccggccattgtcacaggtgaggatgcacagagtggccctgcataaaaccacagatttccaacagaccccagctgtgcaggaacgc

SEQ ID NO: 557544 - DNA, 201 bp, Homo sapiens
aagtgatccacctgcctcggcctcccaaagtgctgggattacaggcatgagccaccacgcccagccagtagtttctttttgacgggaaggcaaggatgggyagaatagatttattttttaaaatccttaggaatctcattaataaaaaaagtaaaacatcattgtaaaaattcaaagagaggtgcataaagtagcaaatca

SEQ ID NO: 557545 - DNA, 201 bp, Homo sapiens
cattggccagacatgtagccctgctcagctgaggacagacacatagggtggtccgaattgtgagctctcccatcccccacccctcactcatgcctgtctgrcctcagcctgggatgcaggggcccttgctgagcggcccctccctgcgcagtttctgtgcacagtggttgccatcctcctccactacatctacatgagcac

SEQ ID NO: 557546 - DNA, 201 bp, Homo sapiens
gcaagcggctctggccgccatcatctcctgggatgccagagggctgcctctccagcggcttgggccggggaggggacactccagttctctagcatggcctraggtatggggtatgtgcatgtggaggccagggtaaggtgaatggggaggctgggaggactggtgttgccctttggagcttggtgaggagggtgggcctag

SEQ ID NO: 557547 - DNA, 201 bp, Homo sapiens
ctgcccctgtgcctctcagccatgcttcttcttcatgatgggagaaagagaaggagggcagggcttggcaggactgtctgagagaatagggaccagcttgyccagggaatagggcacagcatgctggggctggaaggtagcaatgggccctgaaaagctccccaaggcccttccctctgcaggcaggaccctcctcccagc

SEQ ID NO: 557548 - DNA, 201 bp, Homo sapiens
gagtttgagaccagcatggccaacatgttgaaataccatctttacaaaaacacaaaaaattagctgggcatggtggtgcgcacctgtagtcccagctacaygggagactgaggcaagagaatcgcttgaacctgggagtcagaggttgcaagtgagctgagatcgcgccactgcactccagcctgggtgacagagtgagac

SEQ ID NO: 557549 - DNA, 201 bp, Homo sapiens
tcacctggtggaggtgagagtgggcctggggcaaaagcaggctgatgtgcaggtttggcagggaaatggcctcagggcccttgggaggccctgtgttcacrcccacccccttggtgataagccatgcttccctccctgccagtggcaccggatgcccaccacccaggagacagatggcttccaagtaaaacggcctggaga

SEQ ID NO: 557550 - DNA, 201 bp, Homo sapiens; identical to SEQ ID NO: 406644

SEQ ID NO: 557551 - DNA, 201 bp, Homo sapiens
cctttttactcatgggagagtgggtggtatgttccccaactgaggccctcaggcccaggttccaggagcatcagggccacatttggggcagggcaaagcaygctcaccggagccctggattcctcatctggggttcaggggattgatccaggcctacctggtcctgctgcaggcagggagttagggaggctcagagtgctg

SEQ ID NO: 557552 - DNA, 201 bp, Homo sapiens
gtttacactctgtgctcaggcgcccactcccctttgttcctggggctccagcagggctctggtgtgctgctcaggccctacctggctgacgagagggatgragggcatgggctatgggtcccggagggccttgcccctgacctatgcacccccgttggctcacttcccccagcgacctggcatgtcaccagggaaccggat

SEQ ID NO: 557553 - DNA, 201 bp, Homo sapiens
aaagaggctgtcttttgcctttcaacagctctgattaatctcttcctgatgcagagagactttggcaggactcccaaagccccagagccccccactttgarctttttattctcccaaacacttccgtcccaccctgctcctcctctccccatcctcacgtctgtgggtcatgtttctttccatctccgcatctggtcaaga

SEQ ID NO: 557554 - DNA, 201 bp, Homo sapiens
atctcttcctgatgcagagagactttggcaggactcccaaagccccagagccccccactttgaactttttattctcccaaacacttccgtcccaccctgcycctcctctccccatcctcacgtctgtgggtcatgtttctttccatctccgcatctggtcaagaatctgaccctctgtgttgggaacatgggtttagtgcg

SEQ ID NO: 557555 - DNA, 201 bp, Homo sapiens
cagatgccagcccccgttttctcagcccttgctttgccttgcctgctgggctactccttggccacagcctgcagactgctgccctcactggtcctggaatrgtccactccactgtgcccacaagccaacgctgagcctttcgtatttcctccagatcttcagttgtggccgactccgtttctccgagattcccatgaagct

SEQ ID NO: 557556 - DNA, 201 bp, Homo sapiens; identical to SEQ ID NO: 406648

SEQ ID NO: 557557 - DNA, 201 bp, Homo sapiens
acttcagcctgggtgacagagtgagattgtgtctcagaaaaaaaaagactgggccagacacttgggcgctcccagagaagtcctgccatagggaggggggygctgctccaagcccgttggaggttgatttgtgtggttattacagtgttcctgcagatggcagtcgagtgtctcgaggaagtccctcgtgggctgcaagag

SEQ ID NO: 557558 - DNA, 201 bp, Homo sapiens
ccagacagaaggattacttgagaccaggagttcaagaccagcctaagcaacatagtgagaccatcatctcttaaaaaaaaaaaaaaaaatttagccaagcrtggtggtgtgcgcttatggtcccagctactcaggatgctgtggcaggaggattgcttgagtccaggagttcaaggctgcattgagctatgatcctgccac

SEQ ID NO: 557559 - DNA, 201 bp, Homo sapiens
gggtttcccatcccactagctttcctcctcctggcaggagaggtagatgggaaggagaacccagccagctaactttggctgagtttgaagaggatcctatytgccttctttccaagtccagttgtatgactgccaggagaagggacttgagatctgggaaacaaaggggttcctgtctgttagggctcatgagatgcactt

SEQ ID NO: 557560 - DNA, 201 bp, Homo sapiens
agtatgttttaaatgaatatatgacagtagaaaatcttaaaatacttcacagtagtacttaccatagtagtaaatggattctttcatgacatttttgtttytgataaatagatatgcagaccttgggtcataattgaaaatgtaaatcttatgggtggtggtcaaaagtttgaaaaccactagactaggggataaaggtag

SEQ ID NO: 557561 - DNA, 201 bp, Homo sapiens
accagctgcaggatgggcacgagcgggagtacatcaactgcaaccgttacttccgccaggttagccagatgccagcccccgttttctcagcccttgctttrccttgcctgctgggctactccttggccacagcctgcagactgctgccctcactggtcctggaatggtccactccactgtgcccacaagccaacgctgagc

SEQ ID NO: 557562 - DNA, 201 bp, Homo sapiens
acatgttgaaataccatctttacaaaaacacaaaaaattagctgggcatggtggtgcgcacctgtagtcccagctacatgggagactgaggcaagagaatygcttgaacctgggagtcagaggttgcaagtgagctgagatcgcgccactgcactccagcctgggtgacagagtgagaccatgtctaaaaaaaaaaaaggc

SEQ ID NO: 557563 - DNA, 201 bp, Homo sapiens
ggagtttgagaccagcatggccaacatgttgaaataccatctttacaaaaacacaaaaaattagctgggcatggtggtgcgcacctgtagtcccagctacwtgggagactgaggcaagagaatcgcttgaacctgggagtcagaggttgcaagtgagctgagatcgcgccactgcactccagcctgggtgacagagtgaga

SEQ ID NO: 557564 - DNA, 201 bp, Homo sapiens
gttttagcaccgacccccaggacttcatccaggaatggctccgttcccagcgccgagacctcaaggtgtagtcctctttcccgaggggactcctatgtaamgctctgggtgatttttacccacagcagttcccagggtggattagcccaggggtggggattatgctatggctttcctcctggctctttgcagatcatcact

SEQ ID NO: 557565 - DNA, 201 bp, Homo sapiens
accaggtgagcaaggaggacgcgagcggacgggggcgagaggcgctgcgagggcgcccgggccggcggctgaaggggcctcgagtgagggccctggggaaygcatgaggaactccgggagacggtggagggcgggccgggaccctcgggctgcggcgggtcgcggtggagaagtgggaaggggaagcaggttctgcagcgg

SEQ ID NO: 557566 - DNA, 201 bp, Homo sapiens
ttgctttgccttgcctgctgggctactccttggccacagcctgcagactgctgccctcactggtcctggaatggtccactccactgtgcccacaagccaaygctgagcctttcgtatttcctccagatcttcagttgtggccgactccgtttctccgagattcccatgaagctggcagggttgctgcagcatccagacccc

SEQ ID NO: 557567 - DNA, 201 bp, Homo sapiens
acctcaaggtgtagtcctctttcccgaggggactcctatgtaaagctctgggtgatttttacccacagcagttcccagggtggattagcccaggggtgggkattatgctatggctttcctcctggctctttgcagatcatcactgatgtgattggaaatcctgaggaggagagacgagctgctttctaccaccagccctgg

SEQ ID NO: 557568 - DNA, 201 bp, Homo sapiens
agagagatttcatgctcagttttagcaccgacccccaggacttcatccaggaatggctccgttcccagcgccgagacctcaaggtgtagtcctctttcccraggggactcctatgtaaagctctgggtgatttttacccacagcagttcccagggtggattagcccaggggtggggattatgctatggctttcctcctggc

SEQ ID NO: 557569 - DNA, 201 bp, Homo sapiens
ggaccagaccattgctcgcaagcggatggagatccaggaggccatcaaaaagcctctgacagtatgtgtggccctgaccacctctagccttcccaggtttycttgccttccacccccttgttttccaggggccaagcaagttgggctagagccgggtttttcacatgcaggatgcagcccactagtagagtacgaactcag

SEQ ID NO: 557570 - DNA, 201 bp, Homo sapiens
ttttctggcctctaccaccaatcagcaggagatcgcctcccttgatgtcaaggtgggccctctggctccacagcttcctctggggcccaggattggggtgrgctggctctgtccagcatttccatacatgtagcacctggaggacgggatgggaactctggctcagttgcttgcatgtaagctttgggggcacagtctgac

SEQ ID NO: 557571 - DNA, 201 bp, Homo sapiens
aggaagtccctcgtgggctgcaagagggcaccatttccctgcctccagtctgcccagagtcctgcttccatccttcagggcccaggaatcttcagtatccrgagctccagggctgaaatggggcttctctttcttgggatttagcatagcttgagatttgagagctcagcagcaccatctcacacccctttccatccccag

SEQ ID NO: 557572 - DNA, 201 bp, Homo sapiens
agctatgatcctgccactgcactccagcctgggcaacaaaataacaaaaacctcagattgctgggttcactccagagagttcaaaaagttcaaaaaaaaawtttttttttttctgatacggagtctcactctgtcgcccaggctggagtgcagtgacatgatctcagctcactgcaacctccgcctcccaggttcaaacaa

SEQ ID NO: 557573 - DNA, 201 bp, Homo sapiens; identical to SEQ ID NO: 406666

SEQ ID NO: 557574 - DNA, 201 bp, Homo sapiens
gatccaggcctacctggtcctgctgcaggcagggagttagggaggctcagagtgctggactgcttttttttttttctttaactcctgagttgttttttttkgtttgttttgttttgttttgttttttgaagtgggaggagttgctagcgcctataagccctatggagcttggcaaggctcagctgggacttgaactataag

SEQ ID NO: 557575 - DNA, 201 bp, Homo sapiens
aagactgggccagacacttgggcgctcccagagaagtcctgccatagggaggggggcgctgctccaagcccgttggaggttgatttgtgtggttattacartgttcctgcagatggcagtcgagtgtctcgaggaagtccctcgtgggctgcaagagggcaccatttccctgcctccagtctgcccagagtcctgcttcca

SEQ ID NO: 557576 - DNA, 201 bp, Homo sapiens
aagtttgaaaaccactagactaggggataaaggtagttcctttctccttccccttccccatccatagagaaattttcttttttttttttttttttttttcygagatggagtctcgctctttcacctaagctggagtgcagtgttgcgatctcggctcactgcaaccttcgcatcccaggttcaagtaattcttcttgcctc

SEQ ID NO: 557577 - DNA, 201 bp, Homo sapiens
ggagctgtttgtcatggcacgggaacatgctccatctatcatcttcatggacgaaatcgactccatcggctcctcgcggctggaggggggttctggagggracagtgaagtgcagcgcacgatgctggagttgctcaaccagctcgacggctttgaggccaccaagaacatcaaggtaaggtggtagcatccttgggatgg

SEQ ID NO: 557578 - DNA, 201 bp, Homo sapiens
tattgcgggaggagctacagctgctgcaggagcagggctcctatgtgggggaagtagtccgggccatggataagaagaaagtgttggtcaaggtaaaagcrgcatgaccccagggaccagctcggtctccactgcattcccacccctttgtgtgtagcctcgggagacagggttctgtgttctgtcaaggtattgtgggat

SEQ ID NO: 557579 - DNA, 201 bp, Homo sapiens
taagctccctaacaccagctcggcctccacacaggggcaagaatggtgagggagctgtttgtcatggcacgggaacatgctccatctatcatcttcatggwcgaaatcgactccatcggctcctcgcggctggaggggggttctggaggggacagtgaagtgcagcgcacgatgctggagttgctcaaccagctcgacggc

SEQ ID NO: 557580 - DNA, 201 bp, Homo sapiens
agcgtgatctgagtggagagcgggccggggcaggagcgtcgggtgggtcggaggtgcctggaccagtccatgctggacgctgcctgcgaccggatctgctktgtcagcgccgccctcggtgagtcagggcaaggctgggagaggaagacgcggtagaagcggagtgagtgagggaagcgatgggcgcgggaatggccggcc

SEQ ID NO: 557581 - DNA, 201 bp, Homo sapiens
agtgctgctgtatggacctccaggcactgggaagacactgttggcccgggctgtggctcatcatacggactgtacctttattcgtgtctctggctctgaaytggtacagaaattcataggggaaggtaaccatggctagcaatgtgagaagcaagaggtaggggtagggggttagagagctaataagctaataagctccct

SEQ ID NO: 557582 - DNA, 201 bp, Homo sapiens
tcatggacgaaatcgactccatcggctcctcgcggctggaggggggttctggaggggacagtgaagtgcagcgcacgatgctggagttgctcaaccagctygacggctttgaggccaccaagaacatcaaggtaaggtggtagcatccttgggatgggcccagggaaggcctgggtgccacgcaggctgaggaagaggttt

SEQ ID NO: 557583 - DNA, 201 bp, Homo sapiens
ttcacccaggtgacacccaattgccgggtggctctaaggaatgacagctacactctgcacaagatcctgcccaacaaggtagacccattagtgtcactgawgatggtggagaaagtaccagattcaacttatgagatgattggtggactggacaaacagatcaaggagatcaaagaagtgatcgagctgcctgttaagcat

SEQ ID NO: 557584 - DNA, 201 bp, Homo sapiens
gttacatgagccagctgtaacttttctccattagattctgttactcctggaccagtattggacaagcagccttctttgatggctgctgtaaggtccagagrgactcttgaaggacagggcagggtcattaggatcatactggagaatctgaaacaacatgcaggtgccctgtgcccttccctcagctcattcagacctgtg

SEQ ID NO: 557585 - DNA, 201 bp, Homo sapiens
ccgggctgtggctcatcatacggactgtacctttattcgtgtctctggctctgaactggtacagaaattcataggggaaggtaaccatggctagcaatgtragaagcaagaggtaggggtagggggttagagagctaataagctaataagctccctaacaccagctcggcctccacacaggggcaagaatggtgagggagc

SEQ ID NO: 557586 - DNA, 201 bp, Homo sapiens
ggcaacactgaggaggagttctactccttcctcatccccttccaaagcccctgaactcgagtagccgcccctcccatcatggttcccttagtgtggtctcrccgcacaccccgcccattgacccggaattcttctctgcctggtcttcaggtcccaatcctccgcttccgcgcttgcgcgccaagacggctcggatgccgg

SEQ ID NO: 557587 - DNA, 201 bp, Homo sapiens
accccagggaccagctcggtctccactgcattcccacccctttgtgtgtagcctcgggagacagggttctgtgttctgtcaaggtattgtgggattctcakaggtcttcctgggtaggattagtgatttggtggctgtcaaggaaggtcatgagcccttgtttctttaggtacatcctgaaggtaaatttgttgtagacgt

SEQ ID NO: 557588 - DNA, 201 bp, Homo sapiens
tgcaggcacagaggaacgaactaaatgctaaaggtgagtggagaaagatgggaagccgcatgtgggcagtttgtctgaggtctgtccttatctccctgcaytgtgtcttcacagcagtgcttactgttttctccctgtcatcatctagtagtttcacatgcatctctttttcctgagccctattgtagcctccttaaatac

SEQ ID NO: 557589 - DNA, 201 bp, Homo sapiens
caagacggctcggatgccggcggtctctgctgaagagagaagatggcgcttgacggaccagagcaggtatggcgggtgcagtggcggcccggcaggttacrgggctgggtgcggagcgagcgtgatctgagtggagagcgggccggggcaggagcgtcgggtgggtcggaggtgcctggaccagtccatgctggacgctgc

SEQ ID NO: 557590 - DNA, 201 bp, Homo sapiens
actcaggaggactttgagatggcagtagccaaggtataggcctccatctttgtgcctttgccagtggtggctctggggcagtgggctagggcatgtgtgtrttcgtaacttaatgttcattctctctcccacccctaggtcatgcagaaggacagtgagaaaaacatgtccatcaagaaattatggaagtgagtggacagc

SEQ ID NO: 557591 - DNA, 201 bp, Homo sapiens
ggaccagtattggacaagcagccttctttgatggctgctgtaaggtccagagggactcttgaaggacagggcagggtcattaggatcatactggagaatckgaaacaacatgcaggtgccctgtgcccttccctcagctcattcagacctgtgaggtcttggccaagatcctacctcctcctgtctcctgcccttgaataa

SEQ ID NO: 557592 - DNA, 201 bp, Homo sapiens
tccgcgcttgcgcgccaagacggctcggatgccggcggtctctgctgaagagagaagatggcgcttgacggaccagagcaggtatggcgggtgcagtggckgcccggcaggttacggggctgggtgcggagcgagcgtgatctgagtggagagcgggccggggcaggagcgtcgggtgggtcggaggtgcctggaccagtc

SEQ ID NO: 557593 - DNA, 201 bp, Homo sapiens
aaggacagggcagggtcattaggatcatactggagaatctgaaacaacatgcaggtgccctgtgcccttccctcagctcattcagacctgtgaggtcttgrccaagatcctacctcctcctgtctcctgcccttgaataatggaatttgtctcttgtctgccacagctgattgtgaatgataagagccaaaacctccggag

SEQ ID NO: 557594 - DNA, 201 bp, Homo sapiens
atgaggcaacactgaggaggagttctactccttcctcatccccttccaaagcccctgaactcgagtagccgcccctcccatcatggttcccttagtgtggyctcgccgcacaccccgcccattgacccggaattcttctctgcctggtcttcaggtcccaatcctccgcttccgcgcttgcgcgccaagacggctcggatg

SEQ ID NO: 557595 - DNA, 201 bp, Homo sapiens
cctgtgcccttccctcagctcattcagacctgtgaggtcttggccaagatcctacctcctcctgtctcctgcccttgaataatggaatttgtctcttgtcygccacagctgattgtgaatgataagagccaaaacctccggaggctgcaggcacagaggaacgaactaaatgctaaaggtgagtggagaaagatgggaagc

SEQ ID NO: 557596 - DNA, 201 bp, Homo sapiens
aattttgacctttggccttcctttaataagagtgatgcttagctcatgcacgtagaattgggtcctggagactccaaaggagtagctaggtgaccactgtrtctgtttgccatctagttcgcctattgcgggaggagctacagctgctgcaggagcagggctcctatgtgggggaagtagtccgggccatggataagaaga

SEQ ID NO: 557597 - DNA, 201 bp, Homo sapiens
catactggagaatctgaaacaacatgcaggtgccctgtgcccttccctcagctcattcagacctgtgaggtcttggccaagatcctacctcctcctgtctyctgcccttgaataatggaatttgtctcttgtctgccacagctgattgtgaatgataagagccaaaacctccggaggctgcaggcacagaggaacgaacta

SEQ ID NO: 557598 - DNA, 201 bp, Homo sapiens
tcccgcttctctctcaccgtcgctgccaccctcactgctcagcaggttgagactgtgcaggtgcttgggcgtagacactgagagggctagcacgtccccartggcctcatggaagccggggttggcaccctccctcaaggccacaggtaagtctttgtactgcatgaaatactggatgtggcccatttcgtggtgggccac

SEQ ID NO: 557599 - DNA, 201 bp, Homo sapiens
atgcacagacacaatagtgtacacacacacacacactcccctaccctggcccatccagacacccaggcacatgcagacactcgcagagatcccccagcccrcatcccgtgggagtgttccagaacctgaggctccaccactcctggttatagttctccttggtgatgcttccatcaaataccctccagcgccactgatcga

SEQ ID NO: 557600 - DNA, 201 bp, Homo sapiens
gcttgagccaccacgcccagcccttctcaactcttccaaagaagctcataaaccagcctagggagaagtgtatttgaatttggcttcctactccagaatgyttcctttaacagaaagtaactccccaccccatctccaagaaaaatcaatgctcagaaagccattctgtgcttacctgggctttcccttctgtcagggccc

SEQ ID NO: 557601 - DNA, 201 bp, Homo sapiens
gttgtaccaggagcgccagtaggcccccgtgtctgtgaagcctgggggcgtgggggtgaggtatgtagctcaggccaaaggctcggacctcagcctctcakctgtaagtcggctcttccactggctcgaggcccgtggatctgcagctagctggaaaattggcttgggggttgccactctacaatttctaattagctacag

SEQ ID NO: 557602 - DNA, 201 bp, Homo sapiens
gcctctcccacccctggcaccctgcccctcccctgcatggtcccacttgggctctgggctgatgtctggtgggccgtcgcctggtgggtggttgtctggcygctggttgttgcctggctgcttgtcccatgggtgactgtcacctgttgggatgcctcctggctggggaccagcagagggtgcccgtagcagagcagcagg

SEQ ID NO: 557603 - DNA, 201 bp, Homo sapiens
tggcttagggccagaaatctcacacatcagtcccacccacactcctccgagggccacatgtcctggggctgcaagatgctgccactgtcatttctggctgygccaggccccagccactcaatcctgaggcagggccacagtgcttgtttccttgggcatgagctaggctgatggctcccccactggacccagggccagagc

SEQ ID NO: 557604 - DNA, 201 bp, Homo sapiens
tagtctccaactcctggcttcaagtgatcctcccacctaggcctcccagagactgatttttaaggaaagaagaattgctcaggcattgagtaaatgttcaycaaaatctgaaattgagttttttttttttttttttttgatggagtctcgctctgtcgcccaggctggagtgcagtggtgccatctcggctcactgcaagc

SEQ ID NO: 557605 - DNA, 201 bp, Homo sapiens
gagatgggatcttgctatgttgcccaggctagtctccaactcctggcttcaagtgatcctcccacctaggcctcccagagactgatttttaaggaaagaakaattgctcaggcattgagtaaatgttcatcaaaatctgaaattgagttttttttttttttttttttgatggagtctcgctctgtcgcccaggctggagtg

SEQ ID NO: 557606 - DNA, 201 bp, Homo sapiens
cgggttcaagagattctcctgcctcagcctcctgagtagctgggattacaggcgcccgccatcacccctggctaatttatttttgtatttttagtagagayggggtttcgccatgttggccaggctggtctcgaactcctggcctcaggtgatccacccgccttgacctcccaaagtgctgggattacaggtgtgaccacc

SEQ ID NO: 557607 - DNA, 201 bp, Homo sapiens
gagctgccctggggcatgaagccgcagtagaaacaagtaacttctttttttcttttttttttttgagacagcgtctcactcttttgcacaggctggcctgyagtggcacaatctcagctcactgcaacctccgcctcccgggttcaagagattctcctgcctcagcctcctgagtagctgggattacaggcgcccgccatc

SEQ ID NO: 557608 - DNA, 201 bp, Homo sapiens
ggccgattttgtgcagatgttcaggagtggagaccgagagcgccagcacgtccccaatggcctcatggaagccggggttggccccccgacgcagggagacrggcagatccttgtactgcaggtagtactgtatatggcccatctcatggtgcactgtggagagctggtccatcgtgacccgtgtgcactgcttgatcctgg

SEQ ID NO: 557609 - DNA, 201 bp, Homo sapiens
tgccaaggaacagtaacagtgtgtggctcagtggcataatttgtgctcagccaaataggcagggaatgagggtaaagaggaagtgtagccccttttgtagrggagacaaacagaggctttcaatcttttaaaaaacgacttgagcaccacttatttatgtacaaattattctgttactagagattgatttttgtttatttg

SEQ ID NO: 557610 - DNA, 201 bp, Homo sapiens
ttcgtttcgggtaacaggaggacagatcccctgatacttggttctggaaaaggatggttaaattgtcttagggcctagaggttgcaaacagatggatttarcttttgtagaaaaggcatttccacccggcaacccttccccatcctgaggaactggggaagacttcctggaagagggagtttcaggcaggaaaggagaagg

SEQ ID NO: 557611 - DNA, 201 bp, Homo sapiens
tgaaggccaggccagaccctgtgttgggctcactgccccaggattcccctctccctgtaccttgcgagccacacacctcctccagctcctgggcaggcagygctgcccgttctaggtcctgaaccttctttatgatccgcttgatagtggtgttctgcaactggttcacatcaaacttcctggcctgggtgccgtacttca

SEQ ID NO: 557612 - DNA, 201 bp, Homo sapiens
gcaaaatcaactggttgtttcgtaaggctaagctctggggtgcttggttgcacagcaataggtaactaaaacgccatcctccaaggaaggcagcttctgarcctgtcaggggtgagagtggatctgtacagagcacccaacatcctcgtgtgcctccctgtgtcacagcatgtgcccccagggagaggccagctccatgca

SEQ ID NO: 557613 - DNA, 201 bp, Homo sapiens
agcaggaagaggaggctgggaagtcctgcagtagcccaaccctggcccatggccgcaggagagcagagtcctgcagctaccgtcccctggccaataagagyggagcccgcagtgtgacctcacagagccttgtgtctggcttcctctggaaggggaggggccctcaggtctgagcacaccctctctaggatgctgggggaa

SEQ ID NO: 557614 - DNA, 201 bp, Homo sapiens
taggtggtttccatatccaacaggatcttgttgtactgcaggaggaaggagaggcaatgagctgtactcctttgcacttggtctctctggggcctgcactrcccccaggccccatgggctggcaggtggggagccagggagctggggagcgctgccctctcagcagttctgaggtgcacatcgcatggcagatgccatgac

SEQ ID NO: 557615 - DNA, 201 bp, Homo sapiens
tctggtgggccgtcgcctggtgggtggttgtctggctgctggttgttgcctggctgcttgtcccatgggtgactgtcacctgttgggatgcctcctggctrgggaccagcagagggtgcccgtagcagagcagcaggaagaggaggctgggaagtcctgcagtagcccaaccctggcccatggccgcaggagagcagagtc

SEQ ID NO: 557616 - DNA, 201 bp, Homo sapiens
gggtgtgtcctcagctgcccaccagtgttcccatcccagtctctggtgggaggcccttgggcagggccgacccagccgggtcacctcaggagtgtctcagytccacctcggagccgaactggggcccgtgggagtgccggtggaggctgcggtggcggatgctgaagagccgctggctgaggcccagggtggctaccagca

SEQ ID NO: 557617 - DNA, 201 bp, Homo sapiens
tcctgctcatgttgcttagcagggcgttgtactggggagtcagaggggaggaatgctccagtgaccagcccctgggacatctgccctcccctcgctgctasaaggaggagcccacagagtggatgtagcttggacaaggccactcagtggcaccggggcacttctgatcactaagtgtcacttagtgtgaccggatcactt

SEQ ID NO: 557618 - DNA, 201 bp, Homo sapiens
acagtatgatgccccacacatgtgagatgtgagggtcacaacccaccttcccttaccctggacatcccccacccctacctcgggacccacacttccgtggractcatgtggaggcgaggccaggtccttacccagcagatgagcagggatgggtcccctgaggttgatgtatctgtctccgtatcggcgatgcagtgcgcg

SEQ ID NO: 557619 - DNA, 201 bp, Homo sapiens
agatccttgtactgcaggtagtactgtatatggcccatctcatggtgcactgtggagagctggtccatcgtgacccgtgtgcactgcttgatcctggggcrtagagagggcgagggtgagagtgacggatggacagaacagggcagggccagggcacagggcagattggcacctgaaagacaggaatgaggagggagctgc

SEQ ID NO: 557620 - DNA, 201 bp, Homo sapiens
actctgggccagttttggacctagccttgagaactggctgcgtcagtagttgctgtgggggatgctggctgccaggtaaatctgcccacctcagattccaygctgggagggcgcccgagctagcctggagagatgcctgacccacctccagccgttccagccatctcaccccaagcacccaacatgtgagccaagaggcca

SEQ ID NO: 557621 - DNA, 201 bp, Homo sapiens
aagccaacacctctctagacactcagtcccaaactctggccctgtccccatcctgccctgctggctccagctgggggacagtagtggaccctttgcttggytcatttcccttgcccgtggggctcaggaacgagacctgagccctagctggatgtaccggaagtccttgccgttgtagaagtcccaggccgaggcgtggca

SEQ ID NO: 557622 - DNA, 201 bp, Homo sapiens
ccaggccagaccctgtgttgggctcactgccccaggattcccctctccctgtaccttgcgagccacacacctcctccagctcctgggcaggcagtgctgcmcgttctaggtcctgaaccttctttatgatccgcttgatagtggtgttctgcaactggttcacatcaaacttcctggcctgggtgccgtacttcagggtgt

SEQ ID NO: 557623 - DNA, 201 bp, Homo sapiens
caccaccacttgggccttcttcctccattccaaggtatagaagtgactatttgtcaaagctgccagagaaggtggactaataggcctcctataccccctarccctggaacagacccagcctccaaccagtgctggggtagggtagaggcaggcctgggaaccagcttccctgcgcctgggctgcctgcctttccccgggcc

SEQ ID NO: 557624 - DNA, 201 bp, Homo sapiens
agattccggaagtccacttgccaagagaagcagggcgtgggggtatctgcaccgtccagccccagttggagggcaacacctttgggtttacctgctgtctscacagaccctacacaactgcatggtccggagtgcagcagggcaatgtgggaacactagggcaccgccgagaggggagctgcaagggccgtacctgggtcc

SEQ ID NO: 557625 - DNA, 201 bp, Homo sapiens
tgtggtgtccatcgagggggctgaagggaagggcaccaccaagtcatagatgttggaccaggtctgcgcccacatgttccctggaggcgagtgtgggggayggcagagagaggaaagacaaatgttacttaggctcaatgccctcctgcaggaagagcgctccagatcccagtcctgctaatcatagtggcatttcttgag

SEQ ID NO: 557626 - DNA, 201 bp, Homo sapiens
cgttttccccatcacttacaccacacacatcatatgcacagacacaatagtgtacacacacacacacactcccctaccctggcccatccagacacccaggsacatgcagacactcgcagagatcccccagcccgcatcccgtgggagtgttccagaacctgaggctccaccactcctggttatagttctccttggtgatgc

SEQ ID NO: 557627 - DNA, 201 bp, Homo sapiens
caagtgccagtgatgttggcagcagggactcaccattgagccgggcagcctggttgatgagttccacgtatttcgggtaaaactggaggatggctctcccygccttgtctcgccagccctcccatgcccataacaggtcttcatatttccgggacgtggccatcacattcgtcagatctggtaggggtttgaatgccttga

SEQ ID NO: 557628 - DNA, 201 bp, Homo sapiens
tgacttgagggagggtccctgcacttggggctatactgggcaccccattctcctgcgtgctgggcctctgtgcacaatcaccccgttttccccatcacttrcaccacacacatcatatgcacagacacaatagtgtacacacacacacacactcccctaccctggcccatccagacacccaggcacatgcagacactcgca

SEQ ID NO: 557629 - DNA, 201 bp, Homo sapiens
gtcgagtgggaatatatgttggaagatgagtttggggagaaccaggctgggggtggcatttttgacttgagggagggtccctgcacttggggctatactgrgcaccccattctcctgcgtgctgggcctctgtgcacaatcaccccgttttccccatcacttacaccacacacatcatatgcacagacacaatagtgtaca

SEQ ID NO: 557630 - DNA, 201 bp, Homo sapiens
ctgtacaaagtgcttgctctagaggcactgggacattgtgtactttctagagaatgtgtggccagtgggttcccatgtacacatgctttatctcccaagayggaggctccctgaaggaaacaactgtttctgtcaggggtgagagtgggcgattctgcatctcatgcggcccaacagcgacaaacttattcaccccaagaa

SEQ ID NO: 557631 - DNA, 201 bp, Homo sapiens
atgtccggtcatattcctccacaaacttgctggcctcagcctcatcagtcaccaggtctgtgggacagagtgcagggaaacagacaaacctctgcctcccytctccaggtttgtggtctcaccagaagccattatccctctcgcactcccttgtaccctgccctgtccctacccggccccgcctctcccacccctggcacc

SEQ ID NO: 557632 - DNA, 201 bp, Homo sapiens
ccaccgcgcccggcccgaaattgagtattgttttaaatattcaatttaaaatgtggtggcagccccactgtgtggtgagcgggacagcatctctgtgtgtvtgcacatgctcaggtttgggggtggggaggtggctcccaccagaatcttgctggtctctgtggtgatgttggtgttgtagttccagttggcctcggcata

SEQ ID NO: 557633 - DNA, 201 bp, Homo sapiens
tcccagcttggcaccaccctgcagtgagggcagatccctcccattctctggctttggtgacttcccagtctttctcaaccttttctctctctctttttttkggggggaggtctcactctgtcacgcaggctggggtgcagtagtgcaatcacagctcactgtagccttgacctcctgggctcaggtgatccttccccctca

SEQ ID NO: 557634 - DNA, 201 bp, Homo sapiens
tgagcaccacttatttatgtacaaattattctgttactagagattgatttttgtttatttgtttgtttgaatagagatgggatcttgctatgttgcccagsctagtctccaactcctggcttcaagtgatcctcccacctaggcctcccagagactgatttttaaggaaagaagaattgctcaggcattgagtaaatgttc

SEQ ID NO: 557635 - DNA, 201 bp, Homo sapiens
gtatgaagtaggtgccggctctcagtggggcagagaagcccccctcgtggaaaacaagaaagggcatttcctgggcacgctgaccccaagagcgaggggarcccaactctgtgctctcacccagcacccccgggccccatgccagtcccagccctcgcctctcactcagcctgcacatgagctctcacctggctcgagctg

SEQ ID NO: 557636 - DNA, 201 bp, Homo sapiens
aattttgcaaggctgttgagaaaaagatgaggcaacagatcaaagtgccaaggaacagtaacagtgtgtggctcagtggcataatttgtgctcagccaaayaggcagggaatgagggtaaagaggaagtgtagccccttttgtagaggagacaaacagaggctttcaatcttttaaaaaacgacttgagcaccacttattt

SEQ ID NO: 557637 - DNA, 201 bp, Homo sapiens
ctctttcaaacgggccggggtaagaaggaccagccagtggggagaaaagaggacagtcaagagctgtctacttctatccagtaggaagtggcagggtaggkgagggaagtgagaggaatcagaggctcaggttctagtctggcgctttcaggggctgtgtgactcaatttccttatcagtcacatgctgggagaggggctc

SEQ ID NO: 557638 - DNA, 201 bp, Homo sapiens
gctgataacgtcctggatgcagtactcaccctccctggatgcctgcggtcaagcaacacatatccaggcaggggcagagaagagaagacccccaagtgtcktaaaggcccttaggaaggagccagcttggtattagctctgtggcctttctgaacctcagagttaatatcaaatcccatctgtaaaatgggaataagctca

SEQ ID NO: 557639 - DNA, 201 bp, Homo sapiens
tgcctcaagttctccaaccctggaaagggtgggttgagagggagctgggaggtatctgtgtgcgggtccttgtgtcgggggtgagctctttcaaacgggcyggggtaagaaggaccagccagtggggagaaaagaggacagtcaagagctgtctacttctatccagtaggaagtggcagggtaggtgagggaagtgagagg

SEQ ID NO: 557640 - DNA, 201 bp, Homo sapiens
gggctctagctgttggtagaggtgttccagatcgtcctcgaaggtgggggagttgtaccaggagcgccagtaggcccccgtgtctgtgaagcctgggggcrtgggggtgaggtatgtagctcaggccaaaggctcggacctcagcctctcagctgtaagtcggctcttccactggctcgaggcccgtggatctgcagctag

SEQ ID NO: 557641 - DNA, 201 bp, Homo sapiens
gcctgcacagcccagggaatcccatcgggttttgtttcaggctccccgtgtctgttctccttgtaagagacacttcttcagctgtgacagatggtctttgycacttctcccaagtgggagggacttttttctcttctcttgaatctgggtgaacttgtgacttgttctagccaataaaacatggcagaagtgactctgggc

SEQ ID NO: 557642 - DNA, 201 bp, Homo sapiens
cagacccagggtcctagcggcttggccctggtgtgcctgtgatggtggaggggtgggggtgctgtaccttttgggccctgtgacctgcctcctgggatggwctgggtggctcccttccttccgattgctctgccccacacctctgcccatgggccactaagtgcccctttcccacctcccaagctcaccaccctttcttgg

SEQ ID NO: 557643 - DNA, 201 bp, Homo sapiens
aagaaaaaacccatcagccttggcagtgtgagtgggcccaggcacctgcaccgtgcggccggctcccccgggtctgccctgactgacagagcttgtggacygggcagtggccgcagttgaaacacaaagctgtgggtactgcccctcacaatgtgccctcctgcctttcccgttacctgatgtaaggcacgctagaaggaa

SEQ ID NO: 557644 - DNA, 201 bp, Homo sapiens
cctccttggactggtagatgtcacacttgtgcagggggcccgtgtggccagctgcctggcacagtgcctcgtggaactggaactggatgatgaagctgacraagtacctggagcagagcgaggccgtggcccggggcggagttggttgagggccttgtgccactgggccccaggcccttctgcacatcacatgtgatgtgt

SEQ ID NO: 557645 - DNA, 201 bp, Homo sapiens
ctcgggccagcccaggacctcgccgttctgctggttctgctcctgcagccactgggtgactggctggaagtacttgagcagcggctgggcatccagggcayctaagccgaccatgtccttcagcacctcctgccagggcctggaggagccagcctgcagcaccttcctggtgggcagagtgggtaccatgggcacagggga

SEQ ID NO: 557646 - DNA, 201 bp, Homo sapiens
ctcttgacgttgatataaagggcttttattttctttacagttttctgtattttccaaatttctacataaacatacacataaaagtcataaaaatgtccctyaaaatgacactccctccaatgcagggagtgaggaggtgtgtgctgggacgccagcagggtggctgctggcagctaatccctgtgcaggtgcagccactgc

SEQ ID NO: 557647 - DNA, 201 bp, Homo sapiens
cggggtccaacgccagggcgggctgcggcggcagcagcaacagcagcggcagcggcagcagcagccccggcccccggcggcccgaggcggcccccatgacscggtgcgcggtgctcggctctgccccttctcctgcgccgcggccgccctgcgggttataaaacccgacacacccccgcccccgccccgccgcgcttcctc

SEQ ID NO: 557648 - DNA, 201 bp, Homo sapiens
aggctctaggaggatcccgaaccctgcctgacctggggccgggaggcagaaagaagggcagagctgagtggggcaagtgaggtcctgctgtggggtggagyggggtttaggtgaggctgggtgggggcctctcagccctcccatacccgtgtcattggtgacacggtccagcaggccgattttgtgcagatgttcaggagt

SEQ ID NO: 557649 - DNA, 201 bp, Homo sapiens
aggaagctgacgcggccgctgtctgggaggggcccttctgagcgagctgagcgggaagcaaggagacagcatgggcagggcagggcagggcagggcaaggrtgcggggcagggccaggctccgaggtcagccgcatggctgcccagcctggggagggggttaagacccaaggctggaggtggggtgggtggcggtaccgga

SEQ ID NO: 557650 - DNA, 201 bp, Homo sapiens
ttattttccatttccccttctatttgtcattgttctaatgtgggagctgggctgggggccagaaagacccatttctgggtggagattcctcatggaagcawgtttatgcctcaagttctccaaccctggaaagggtgggttgagagggagctgggaggtatctgtgtgcgggtccttgtgtcgggggtgagctctttcaaa

SEQ ID NO: 557651 - DNA, 201 bp, Homo sapiens
gaggcaatgagctgtactcctttgcacttggtctctctggggcctgcactacccccaggccccatgggctggcaggtggggagccagggagctggggagcrctgccctctcagcagttctgaggtgcacatcgcatggcagatgccatgacttgatacaacgaggaagaggaagcagcgtgaaggccaggccagaccctgt

SEQ ID NO: 557652 - DNA, 201 bp, Homo sapiens
gatgggtcccctgaggttgatgtatctgtctccgtatcggcgatgcagtgcgcggcggacgaaggcatggaggttcaggtagaggggctctagctgttggyagaggtgttccagatcgtcctcgaaggtgggggagttgtaccaggagcgccagtaggcccccgtgtctgtgaagcctgggggcgtgggggtgaggtatgt

SEQ ID NO: 557653 - DNA, 201 bp, Homo sapiens
gtctgccctgactgacagagcttgtggaccgggcagtggccgcagttgaaacacaaagctgtgggtactgcccctcacaatgtgccctcctgcctttcccrttacctgatgtaaggcacgctagaaggaatgtggaacttggcccctgggtcaaagtcaccttgagtcctgggcactggggggcagaggccctggtacttc

SEQ ID NO: 557654 - DNA, 201 bp, Homo sapiens
ccctccaggttgatgtgctgggccccgtagtgacggtgcagggcccggcgcacgtaggcatgcaggttgaggtagagtggctgcagctcctggaagagcckctccaggtcttgctccagggatggtgtctcgtacatagacctccacgagtcccctgcatctacatagcctacagaggggacacagccaggctctcccaac

SEQ ID NO: 557655 - DNA, 201 bp, Homo sapiens
gggttcctccctccctgatgggctgctctcccccgacccccacgatggggcactaggaggccgcccccgagctctgcctcagccctcagcccacctgctgmcgcttagccaggggcaggttggcagagcccagggtgcgcacagctccgatgatcctgcgcagctgcgggtccgtgaagttctgccagatcggttcataca

SEQ ID NO: 557656 - DNA, 201 bp, Homo sapiens
aagcagggcgtgggggtatctgcaccgtccagccccagttggagggcaacacctttgggtttacctgctgtctccacagaccctacacaactgcatggtcyggagtgcagcagggcaatgtgggaacactagggcaccgccgagaggggagctgcaagggccgtacctgggtccagggaccagcaggtggcagtcttgttg

SEQ ID NO: 557657 - DNA, 201 bp, Homo sapiens
gatcactaagtgtcacttagtgtgaccggatcacttctgagtcccctgccagtggaggcagcctgtggagtgggggacaggagtcctgaaagtcagggtcwgggtcaagtcccagcttggcaccaccctgcagtgagggcagatccctcccattctctggctttggtgacttcccagtctttctcaaccttttctctctct

SEQ ID NO: 557658 - DNA, 201 bp, Homo sapiens
ttcctggacagggagaggcctgctcaccgtcctgcttgtaggcttcattgctgagggcagtgaaatcctcgtacagcggtttcagcgggatgcccgcagcrttgtgccagccctcccaggcaaacaggagcatggcgtagcttcgcgaggaagccaggatgttggtgagatctgagacacaggcaggcagggtcggtgagg

SEQ ID NO: 557659 - DNA, 201 bp, Homo sapiens
agaggacacctggcgtggttcctggacagggagaggcctgctcaccgtcctgcttgtaggcttcattgctgagggcagtgaaatcctcgtacagcggtttyagcgggatgcccgcagcgttgtgccagccctcccaggcaaacaggagcatggcgtagcttcgcgaggaagccaggatgttggtgagatctgagacacagg

SEQ ID NO: 557660 - DNA, 201 bp, Homo sapiens
agagctgcgccccggcctcgtcagcagaaaagttgccgggctgcagcccggggtccaacgccagggcgggctgcggcggcagcagcaacagcagcggcagsggcagcagcagccccggcccccggcggcccgaggcggcccccatgacgcggtgcgcggtgctcggctctgccccttctcctgcgccgcggccgccctgcg

SEQ ID NO: 557661 - DNA, 201 bp, Homo sapiens
acttcccgcccgtcggccggcttctccagcatcgacccttcccagaactcgggaggcatgggggagagctccagggaggtgaagaactcctctgccacccrgaacatgtgcgtggcgttccagccctggaggaggggtgtggagccaggtcagggggagcccactctggctggcctggggacagggctggggtccccatct

SEQ ID NO: 557662 - DNA, 201 bp, Homo sapiens
gcctgctggaattgtcataccagctgctctgcctgactctgggctgggactctggggagacagctgagagaggacacctggcgtggttcctggacagggaraggcctgctcaccgtcctgcttgtaggcttcattgctgagggcagtgaaatcctcgtacagcggtttcagcgggatgcccgcagcgttgtgccagccctc

SEQ ID NO: 557663 - DNA, 201 bp, Homo sapiens
agaggtgttccagatcgtcctcgaaggtgggggagttgtaccaggagcgccagtaggcccccgtgtctgtgaagcctgggggcgtgggggtgaggtatgtrgctcaggccaaaggctcggacctcagcctctcagctgtaagtcggctcttccactggctcgaggcccgtggatctgcagctagctggaaaattggcttgg

SEQ ID NO: 557664 - DNA, 201 bp, Homo sapiens
atctcagcctccctagcagctaggactacaggcatgcaccaccacatccaactaattttttgtattttatttgtagagacggggtcttgctgtattgcccwggctgggctcaagcgattctcatgcctcagcctcccaagtagctgggactacaggcatctaccaccacgcccagctaacttttgtatttttagtacagat

SEQ ID NO: 557665 - DNA, 201 bp, Homo sapiens
gggactcatgtggaggcgaggccaggtccttacccagcagatgagcagggatgggtcccctgaggttgatgtatctgtctccgtatcggcgatgcagtgcrcggcggacgaaggcatggaggttcaggtagaggggctctagctgttggtagaggtgttccagatcgtcctcgaaggtgggggagttgtaccaggagcgcc

SEQ ID NO: 557666 - DNA, 201 bp, Homo sapiens
ttagccatcgtgcatcctgtgaaatggggttcacaggtcaggaaatggaagctcacagaaattgaggaattttctcaaggaaacaaagtaatggagacggrgtttgaacccagttctgtctgaccccagcctgtgactgtaacttgccccagcaaccctgcctcccaccttaaccgatctccaatcctacattttagtgtc

SEQ ID NO: 557667 - DNA, 201 bp, Homo sapiens
tgggactcatgtggaggcgaggccaggtccttacccagcagatgagcagggatgggtcccctgaggttgatgtatctgtctccgtatcggcgatgcagtgmgcggcggacgaaggcatggaggttcaggtagaggggctctagctgttggtagaggtgttccagatcgtcctcgaaggtgggggagttgtaccaggagcgc

SEQ ID NO: 557668 - DNA, 201 bp, Homo sapiens
agtgaggtctccatccctggggtatatgcaagtagaggcaaggtgtggccaaatgggccgtgtggatctactagggtggtctgggcagggaagccagtccyacatgatcttatccaaagcatcacgaattccctggtagaaatctgccagtcaaggctggaggattctccccagcttaaagtctgaagaggttttaaatgt

SEQ ID NO: 557669 - DNA, 201 bp, Homo sapiens
tctcctgcatgtgaagcaaacagtatgatgccccacacatgtgagatgtgagggtcacaacccaccttcccttaccctggacatcccccacccctacctcrggacccacacttccgtgggactcatgtggaggcgaggccaggtccttacccagcagatgagcagggatgggtcccctgaggttgatgtatctgtctccgt

SEQ ID NO: 557670 - DNA, 201 bp, Homo sapiens
gtttattttccatttccccttctatttgtcattgttctaatgtgggagctgggctgggggccagaaagacccatttctgggtggagattcctcatggaagmaagtttatgcctcaagttctccaaccctggaaagggtgggttgagagggagctgggaggtatctgtgtgcgggtccttgtgtcgggggtgagctctttca

SEQ ID NO: 557671 - DNA, 201 bp, Homo sapiens
caccacacccggccagcctcccctcacacttggcatgggtacccacatccacaacttgtaggccaaaccctgtcctgggaaaaccgtttctcctgtttatyttccatttccccttctatttgtcattgttctaatgtgggagctgggctgggggccagaaagacccatttctgggtggagattcctcatggaagcaagttt

SEQ ID NO: 557672 - DNA, 201 bp, Homo sapiens
caccaccatgtcgtagatgttttcccagctctgggcccacatgtctcctagataaggaaggaaggggacagcttggctccctgcctggctgtgcctgcttyttcatgcatcgctgagtggcaccctggggccggcacctgtaccctggggccctcaagggctgcaggcctggcttagggccagaaatctcacacatcagtc

SEQ ID NO: 557673 - DNA, 201 bp, Homo sapiens
aaccagaaggttctaccgtctctcgtcagtccttccttgttctcatttacttatttattttttatgaaatggggtctcgctatgttgcccaggatggtctygaacccctgagctcaagcagacctcctgcctcggcttcccaaagtgctgagattacaggtgtgagccaccgcacccagcccttccttgttgtttagcaaa

SEQ ID NO: 557674 - DNA, 201 bp, Homo sapiens
ctggtctcaaactcccggcctcaagtgatctactcaccttggcctcccaaagtgctgggattagaggcatgagccaccacacccggccagcctcccctcamacttggcatgggtacccacatccacaacttgtaggccaaaccctgtcctgggaaaaccgtttctcctgtttattttccatttccccttctatttgtcatt

SEQ ID NO: 557675 - DNA, 201 bp, Homo sapiens
tgacaaagtacctggagcagagcgaggccgtggcccggggcggagttggttgagggccttgtgccactgggccccaggcccttctgcacatcacatgtgaygtgtgctaagtcacatgcgcacagcagagccaaggccccccaactctgcccacagctatcagggtgagctcccccaccccagctcttagcattgtctgag

SEQ ID NO: 557676 - DNA, 201 bp, Homo sapiens
cagcagccactggcccacgcgggcctgctgcgcatccaggtccaggcccaggaagctgacgcggccgctgtctgggaggggcccttctgagcgagctgagygggaagcaaggagacagcatgggcagggcagggcagggcagggcaagggtgcggggcagggccaggctccgaggtcagccgcatggctgcccagcctggg

SEQ ID NO: 557677 - DNA, 201 bp, Homo sapiens
gaaaggatgggagtggctctccagcagtggcttacagagtccccggcctggggccacatgctgcagacacctgcagggcctcagcagtcctgtgaggggcrtgcttgagtctctctcctctcctttttttttttttttttttttctgagacagggtctcactctgttgcccaggctggagtgcagtggcgccatctcggct

SEQ ID NO: 557678 - DNA, 201 bp, Homo sapiens
agaaagaagggcagagctgagtggggcaagtgaggtcctgctgtggggtggagcggggtttaggtgaggctgggtgggggcctctcagccctcccataccsgtgtcattggtgacacggtccagcaggccgattttgtgcagatgttcaggagtggagaccgagagcgccagcacgtccccaatggcctcatggaagccgg

SEQ ID NO: 557679 - DNA, 201 bp, Homo sapiens
tggcctcatggaagccggggttggcaccctccctcaaggccacaggtaagtctttgtactgcatgaaatactggatgtggcccatttcgtggtgggccacyaccaggtcctccaagttcacggtggtgcactgcttgatcctaggaatagtggagtgggggagagggtgttgggagaggacagtgagaagccctgggcata

SEQ ID NO: 557680 - DNA, 201 bp, Homo sapiens
caaactgggggttccggggacagactgcgtgctgccgtggggatcccgggggagggctaaactggagggaactcctgaatcagagggtccctcccatcccrgcggggcctccctgcccctgggctggtgcggacctgctttagcatagcctctgtggtgtccatcgagggggctgaagggaagggcaccaccaagtcatag

SEQ ID NO: 557681 - DNA, 201 bp, Homo sapiens
ccacccccgacccccaccaccccaggcttgagcccagagcttacctgctgcagcatagtactggtgacatcgaggttgggcttgtctgggaaaggcaccaycatgtcgtagatgttttcccagctctgggcccacatgtctcctagataaggaaggaaggggacagcttggctccctgcctggctgtgcctgcttcttcat

SEQ ID NO: 557682 - DNA, 201 bp, Homo sapiens
ggaaccccagaacgtgctcttcccatgtctgaacctgaagtctttcctgttgtagaagtcccaagccgaggcgtggcacaccacttcccgcccgtcggccrgcttctccagcatcgacccttcccagaactcgggaggcatgggggagagctccagggaggtgaagaactcctctgccacccggaacatgtgcgtggcgtt

SEQ ID NO: 557683 - DNA, 201 bp, Homo sapiens
ttttgtagaaaaggcatttccacccggcaacccttccccatcctgaggaactggggaagacttcctggaagagggagtttcaggcaggaaaggagaaggcrgtgggtcacagcgggggacatcattagagaggagaggctagaactggctggggcaggaggcgcctggctgtccaggaggctggggagggctagctggggc

SEQ ID NO: 557684 - DNA, 201 bp, Homo sapiens
acctgaagtctttcctgttgtagaagtcccaagccgaggcgtggcacaccacttcccgcccgtcggccggcttctccagcatcgacccttcccagaactcrggaggcatgggggagagctccagggaggtgaagaactcctctgccacccggaacatgtgcgtggcgttccagccctggaggaggggtgtggagccaggtc

SEQ ID NO: 557685 - DNA, 201 bp, Homo sapiens
gccggcttctccagcatcgacccttcccagaactcgggaggcatgggggagagctccagggaggtgaagaactcctctgccacccggaacatgtgcgtggmgttccagccctggaggaggggtgtggagccaggtcagggggagcccactctggctggcctggggacagggctggggtccccatctcgggtcaactccctg

SEQ ID NO: 557686 - DNA, 201 bp, Homo sapiens
gacggtgcagggcccggcgcacgtaggcatgcaggttgaggtagagtggctgcagctcctggaagagccgctccaggtcttgctccagggatggtgtctcrtacatagacctccacgagtcccctgcatctacatagcctacagaggggacacagccaggctctcccaacaccacattacctgcctcctccagggatctac

SEQ ID NO: 557687 - DNA, 201 bp, Homo sapiens
tgttactagagattgatttttgtttatttgtttgtttgaatagagatgggatcttgctatgttgcccaggctagtctccaactcctggcttcaagtgatcytcccacctaggcctcccagagactgatttttaaggaaagaagaattgctcaggcattgagtaaatgttcatcaaaatctgaaattgagtttttttttttt

SEQ ID NO: 557688 - DNA, 201 bp, Homo sapiens
atacttggttctggaaaaggatggttaaattgtcttagggcctagaggttgcaaacagatggatttagcttttgtagaaaaggcatttccacccggcaacscttccccatcctgaggaactggggaagacttcctggaagagggagtttcaggcaggaaaggagaaggcggtgggtcacagcgggggacatcattagagag

SEQ ID NO: 557689 - DNA, 201 bp, Homo sapiens
ggagacccaagacaggctcaggagagtgggccactctaactccaggcctttgaggtctggaggagcatggggacaagccctggggatgaggcagctaggawcacaggaggagaagtggattgagggtgtgacagtactgggggtgggtggggtgggggcgctaatacctgatgtatggtgtcacatttggaacatgaaact

SEQ ID NO: 557690 - DNA, 201 bp, Homo sapiens
tggcttctccagcatcgacttgttccagaactcaggaggcacgggcagcagccccagggaggtgaagaaatcatcagcctccttaaacatcctcctgggcrtccagccctgcaagcagagggagttctgcccaaactgggggttccggggacagactgcgtgctgccgtggggatcccgggggagggctaaactggaggga

SEQ ID NO: 557691 - DNA, 201 bp, Homo sapiens
ctgagtggggcaagtgaggtcctgctgtggggtggagcggggtttaggtgaggctgggtgggggcctctcagccctcccatacccgtgtcattggtgacayggtccagcaggccgattttgtgcagatgttcaggagtggagaccgagagcgccagcacgtccccaatggcctcatggaagccggggttggccccccgacg

SEQ ID NO: 557692 - DNA, 201 bp, Homo sapiens
ggctggaccagaagctatcttgggggagaagggagacccaagacaggctcaggagagtgggccactctaactccaggcctttgaggtctggaggagcatgrggacaagccctggggatgaggcagctaggatcacaggaggagaagtggattgagggtgtgacagtactgggggtgggtggggtgggggcgctaatacctg

SEQ ID NO: 557693 - DNA, 201 bp, Homo sapiens
gacacctcctgccacaccctttgccagccgctcctctctgcctcccacttcccccggcttcccaccacacaccggagcttggcccctgccttggtggaccrgtagatgtcacactggtgcagtgggccctcatagcctgcctccttgcacagggcttcatggaactggaactgcaggacaaaactcacaaagtacctgcag

SEQ ID NO: 557694 - DNA, 201 bp, Homo sapiens
ggatggctctccccgccttgtctcgccagccctcccatgcccataacaggtcttcatatttccgggacgtggccatcacattcgtcagatctggtaggggkttgaatgccttgagctccagcccttagctcacctctgcttgtaaggggagctcagagaatttcagagctggaataaaattggcgaaaccacataaaagtg

SEQ ID NO: 557695 - DNA, 201 bp, Homo sapiens
acaccacttcccgcccgtcggccggcttctccagcatcgacccttcccagaactcgggaggcatgggggagagctccagggaggtgaagaactcctctgcmacccggaacatgtgcgtggcgttccagccctggaggaggggtgtggagccaggtcagggggagcccactctggctggcctggggacagggctggggtccc

SEQ ID NO: 557696 - DNA, 201 bp, Homo sapiens
ctctgggctgatgtctggtgggccgtcgcctggtgggtggttgtctggctgctggttgttgcctggctgcttgtcccatgggtgactgtcacctgttgggrtgcctcctggctggggaccagcagagggtgcccgtagcagagcagcaggaagaggaggctgggaagtcctgcagtagcccaaccctggcccatggccgca

SEQ ID NO: 557697 - DNA, 201 bp, Homo sapiens
tgatgagttccacgtatttcgggtaaaactggaggatggctctccccgccttgtctcgccagccctcccatgcccataacaggtcttcatatttccgggaygtggccatcacattcgtcagatctggtaggggtttgaatgccttgagctccagcccttagctcacctctgcttgtaaggggagctcagagaatttcagag

SEQ ID NO: 557698 - DNA, 201 bp, Homo sapiens
tgcccttacccagcaggtgagcaggaatgggcccctccaggttgatgtgctgggccccgtagtgacggtgcagggcccggcgcacgtaggcatgcaggttsaggtagagtggctgcagctcctggaagagccgctccaggtcttgctccagggatggtgtctcgtacatagacctccacgagtcccctgcatctacatagc

SEQ ID NO: 557699 - DNA, 201 bp, Homo sapiens
cccagccgggtcacctcaggagtgtctcagctccacctcggagccgaactggggcccgtgggagtgccggtggaggctgcggtggcggatgctgaagagcygctggctgaggcccagggtggctaccagcagggcgatgcccaggaagagcagcagccactggcccacgcgggcctgctgcgcatccaggtccaggcccag

SEQ ID NO: 557700 - DNA, 201 bp, Homo sapiens
aggcccttgggcagggccgacccagccgggtcacctcaggagtgtctcagctccacctcggagccgaactggggcccgtgggagtgccggtggaggctgckgtggcggatgctgaagagccgctggctgaggcccagggtggctaccagcagggcgatgcccaggaagagcagcagccactggcccacgcgggcctgctgc

SEQ ID NO: 557701 - DNA, 201 bp, Homo sapiens
tccccagctcccactcacagcctcttcctcgccctctaagatcacacaatgttgtgatgggtgccgtggtctcctggacaagattattaacttcttccccyatccatggtgacttgcccgacatagatctgcagtgaatgtggcaccagatgcaagtggggggctccccactcccagcgcccacccccctccagcctgggc

SEQ ID NO: 557702 - DNA, 201 bp, Homo sapiens
tgctcttcccatgtctgaacctgaagtctttcctgttgtagaagtcccaagccgaggcgtggcacaccacttcccgcccgtcggccggcttctccagcatsgacccttcccagaactcgggaggcatgggggagagctccagggaggtgaagaactcctctgccacccggaacatgtgcgtggcgttccagccctggagga

SEQ ID NO: 557703 - DNA, 201 bp, Homo sapiens
caccagtgttcccatcccagtctctggtgggaggcccttgggcagggccgacccagccgggtcacctcaggagtgtctcagctccacctcggagccgaackggggcccgtgggagtgccggtggaggctgcggtggcggatgctgaagagccgctggctgaggcccagggtggctaccagcagggcgatgcccaggaagag

SEQ ID NO: 557704 - DNA, 201 bp, Homo sapiens
cttactgtcctcaccgcctacttcacacattcagggcatctgagattgcagcccttggcaaaggagggtccagggttgaagtagatttacattctcaggtycttctttgttccagttcccttggcctgaacactgcgtctgtcctctcatcccccacttcccatctgtcaaaccctgtcatcttccgaggccctgctcaca

SEQ ID NO: 557705 - DNA, 201 bp, Homo sapiens
aagaaactcaggatgaatggaaggctcagaaacagatttggactcaaggctctttcctagccaagtgaggtgaagcttcggctgacatcagatgaagtctraagtgcaaaccagtgagagagggttagagcgatgagtgatggagagaacatgagagagaagagggagagagccagggagagagccagagagagagacaga

SEQ ID NO: 557706 - DNA, 201 bp, Homo sapiens
tccttaaacatcctcctgggcgtccagccctgcaagcagagggagttctgcccaaactgggggttccggggacagactgcgtgctgccgtggggatcccgsgggagggctaaactggagggaactcctgaatcagagggtccctcccatcccggcggggcctccctgcccctgggctggtgcggacctgctttagcatagc

SEQ ID NO: 557707 - DNA, 201 bp, Homo sapiens
cccaggccgaggcgtggcagaccacctcccgcccgtcggttggcttctccagcatcgacttgttccagaactcaggaggcacgggcagcagccccagggargtgaagaaatcatcagcctccttaaacatcctcctgggcgtccagccctgcaagcagagggagttctgcccaaactgggggttccggggacagactgcgt

SEQ ID NO: 557708 - DNA, 201 bp, Homo sapiens
aggtgaagaaatcatcagcctccttaaacatcctcctgggcgtccagccctgcaagcagagggagttctgcccaaactgggggttccggggacagactgcrtgctgccgtggggatcccgggggagggctaaactggagggaactcctgaatcagagggtccctcccatcccggcggggcctccctgcccctgggctggtg

SEQ ID NO: 557709 - DNA, 201 bp, Homo sapiens
gggtcctttctgggttcttagtcttctctgagatgaccttaaggagagtattgtttcctcctaaatgatagctttaaaactacgtcaaaactataagcctrtgcttgcttactgatttccagatttcttcaagaagaaattacctattatatattttaatttatattttctgctgcattttaactgcctaacaaacttaga

SEQ ID NO: 557710 - DNA, 201 bp, Homo sapiens
ggttgtgtaatggtaacagatcttagtatcataagaatacaggataactcagagatggttataaatgtaagttcaaggtgacatgtttataaaggatcccstgaaattattttaggtgttatctttatgctttcattcttgtttcgaccattattttgagaaatatttttagctgctcgaaaagaatcttaatcattggta

SEQ ID NO: 557711 - DNA, 201 bp, Homo sapiens
tttgagacagggtcttgctctgtcacctagcatggagtgcacgatcatcacttactacagcctccagcttctggggctcaatcgatcctcctgcctcagcmtcttgagtagctgggactacaggcatgcatcacaatgcctggctaatttttctttctttttttttttttttgtacagatggggtcccattatgttgccta

SEQ ID NO: 557712 - DNA, 201 bp, Homo sapiens
tttctgtgttgtccttctggtgtttgggagtgtctctgaagccaagtttgatgattttgaggatgaggaggacatagtagagtatgatgataatgacttcrctgaatttgaggatgtcatggaagactctgttactgaatctcctcaacgggtcataatcactgaagatgatgaagatgagaccactgtggagttggaagg

SEQ ID NO: 557713 - DNA, 201 bp, Homo sapiens
gtttattccacattattccatttaggttttgtttattttttatttttggacttgagtgctcctgtgtgaagtattgagtgtattcgtgttctattactacrtagcaaattacccaagtgtagcagcttaaaacaaccctcatttattatgttaccgtttctgcaggtcagaagtgcagcatgtattgagtgggtcctctag

SEQ ID NO: 557714 - DNA, 201 bp, Homo sapiens
gactgccccacttcagatgcagtcgaatgtcccaggttacccatactaccatctggacttctgaccaactaactattaatcgggttcctatgacctccccrctcaaccaataatttgttagaatggctcatagaacttgaaaagacacttatatttactggtttattataagggataaaactcaggagtagccaaatgaaa

SEQ ID NO: 557715 - DNA, 201 bp, Homo sapiens
agattaaagggctcagccccacaagactgccccacttcagatgcagtcgaatgtcccaggttacccatactaccatctggacttctgaccaactaactatwaatcgggttcctatgacctccccactcaaccaataatttgttagaatggctcatagaacttgaaaagacacttatatttactggtttattataagggata

SEQ ID NO: 557716 - DNA, 201 bp, Homo sapiens
tgggcaacatcatgagaccttgtctctactagtaaaaaaaaaaaaaaattagctgtgcatagtggtgcatacctgtagtcccaactacttgggagactgargtggaaggattacttgaacctgggagattgaggctgcagtgagctatgatcacaccactgcactctagcctgggcagccaaaaaaaaaagagggagagga

SEQ ID NO: 557717 - DNA, 201 bp, Homo sapiens
ggactacaggcgtccgccaccactcccagccaattttttgtattttagtagagatggggtttcaccatgttggccaggatggtctcgatctcctgacctcrtgatccgcccgtgttggcctcccagagtgctgggattacaggcatgagccactgcacccggcctcttcattctttcaataaataattatgctggctccca

SEQ ID NO: 557718 - DNA, 201 bp, Homo sapiens
ctattatctaaataaacttgctatgtaaaatttaaaatctgattatagaattagagatttccaatatttttgtttgtatttttgttttctgttttttaccyaactagaatctcaaactcaaaagctttttgggtatagtatgttatatttgaaagctcggtatgatctgatgtgtttctgaaataagatgccatagtccag

SEQ ID NO: 557719 - DNA, 201 bp, Homo sapiens
ctggagtgcagtggcgcgatctcagctcgctgcagcctccacctcccgggttcaagcgattcttctgcctcagcctccctagtagctgggactacaggcayatgccaccatgctcagctaatttttgtatttttagtagagatggggtttcaccatgttcaggatagtttcaatctcttgacctcgtgatccgcctgcttc

SEQ ID NO: 557720 - DNA, 201 bp, Homo sapiens
tcaccatgttcaggatagtttcaatctcttgacctcgtgatccgcctgcttcagcctcccaaagtgctgggattacaggcgtgagccaccgtgccaggtcttttttttttttttttttccttattctggtagtggggaaatggtatcccacttgttttgttttgttttgttttgtttgagacatagtcttgctgtgttgcc

SEQ ID NO: 557721 - DNA, 201 bp, Homo sapiens
atggcatgatcttggctcactgcaacctctgcctcccgtattcaagcaattctcctgcctcagcctcccaagtagctgagattacagatgcccaccaccaygcctggccaatttttgtatttttagtagagtcagggtttcaccatgttggccaggccagtctcgaactcctgacctcaagtgatccatccactctggcct

SEQ ID NO: 557722 - DNA, 201 bp, Homo sapiens
cagcctcccaaagtgctgggattacaggcgtgagccaccgtgccaggtcttttttttttttttttttccttattctggtagtggggaaatggtatcccacktgttttgttttgttttgttttgtttgagacatagtcttgctgtgttgcccaggcagagtgcaatggcatgatctcagcttactgcaacctctgcctcctg

SEQ ID NO: 557723 - DNA, 201 bp, Homo sapiens
gctgaggcagaagaatggcgtgaacccgggaggcggagcttgcagtgagccgagatcgtgccactgcactccagcctgggtgacagagtcagactccgtcycaaaaaaaaaaaaaaaaaaaaacccttggtacatatctcccgtaatacccactgcagccctaagaggcaagtagcaaatggtatcccttttttgtatgtg

SEQ ID NO: 557724 - DNA, 201 bp, Homo sapiens
acttctctcatttttttcagttcctcaagagacaagacttactgaatgtcctggcccggatgatgaggccagtgagtgatcaagtggtatgtattcttccygctggttttctgtgtacagactgaattatttgttttctttctttctttttttttttttttttgatggagtctcactctgttgctcaggctggagtgcaat

SEQ ID NO: 557725 - DNA, 201 bp, Homo sapiens
tcaaaccagaataacaaaggctggttaattatagtagtttctttcaaaactgagattttagtttacctttgcttcatttgaagttgatttaatttttattyactaatgtagatattggcaattatttttataactatcttctagaatgttatggtgcaagcctaagtttttgaataatactataggcagtattctaatttg

SEQ ID NO: 557726 - DNA, 201 bp, Homo sapiens
gccaaaggagtttttatattactttgcaataattggttagcctttgatgattattgaatccttatatgtaacaaaagttctgttttagacagatgctggtrgtttttagggaggaaaagtagggagtggggagagcattaagacgataccatttaaaataatatggtggctcttcagcaggtgggggtaacttgtagtggc

SEQ ID NO: 557727 - DNA, 201 bp, Homo sapiens
agcacttctagttttactacttatcagggaataagtaaaatttattccttggtgatgtacagtacattgaatttatttgggggttaaggaccaagtgtaawacaaagggctttccagcttttcatcccatttgattgtccttatatttccttaaagaatcttttatcaagctagcctagaaaagtaaaatggacctatttt

SEQ ID NO: 557728 - DNA, 201 bp, Homo sapiens
ttgatgttttcttgtatgtctacattaaacttgagaaaaagtaaaaattagaacactgtatgtagtaatgaaatttcagggacccagaacataatgtagtrtatgtttttaggtgggagatgctgataacaaaattaataggaagtctgtaggcattaggatactgacatgtacatggaaaattctagggacaggagcatc

SEQ ID NO: 557729 - DNA, 201 bp, Homo sapiens
aaaaggaatgatctatgaaatctgtgtaggttttaaatattttaaaaattataatacaaatcatcagtgcttttagtacttcagtgtttaaagaaataccrtgaaatttataggtagataaccagattgttgctttttgtttaaaccaagcagttgaaatggctataaagactgactctaaaccaagattctgcaaataat

SEQ ID NO: 557730 - DNA, 201 bp, Homo sapiens
taagaaatttgcaatgaataacctgatggaacaagattcttaaaatttattgaactgaagtagaatgtatcttctggcagttatacatttatgatataatsccatcatgaatggtatggtgaacatcaggctaagtgttccctgggtacagaaaaaaatcaaaccagaataacaaaggctggttaattatagtagtttctt

SEQ ID NO: 557731 - DNA, 201 bp, Homo sapiens
gtaccgttggcctatcctttatggcatttctcaaaatcatttgtacctttcaaattttatgaactttaattctaagaacatttaatttctttctttctttcttcttccttccttccttccttccttccttcctttctttctttctttcttttttttttttttgacacagtctcgctctgtcacccaggctggagtgcagtg

SEQ ID NO: 557732 - DNA, 201 bp, Homo sapiens
atatttatactaactggcaaatgtgtcgtaaagtatatttgatgaagcatttgattctccttcaaggccttttttttatactaagtaggagttgcagttgratttacttacttctctcatttttttcagttcctcaagagacaagacttactgaatgtcctggcccggatgatgaggccagtgagtgatcaagtggtatgt

SEQ ID NO: 557733 - DNA, 201 bp, Homo sapiens
agtagaaatggggtttcaccatgttggtcaggctggtctcgaactcctgatctcaggtgatccacccacctcggcctctcaaagtgctgggattacaggcrtgagccactacgcccagctattttttgaattattatttgaagttgaacatttttcatgtgtattgacttaacataaatatctcttaaatgtgctagcata

SEQ ID NO: 557734 - DNA, 201 bp, Homo sapiens
taccgttggcctatcctttatggcatttctcaaaatcatttgtacctttcaaattttatgaactttaattctaagaacatttaatttctttctttctttcttcttccttccttccttccttccttccttcctttctttctttctttcttttttttttttttgacacagtctcgctctgtcacccaggctggagtgcagtgg

SEQ ID NO: 557735 - DNA, 201 bp, Homo sapiens
accgttggcctatcctttatggcatttctcaaaatcatttgtacctttcaaattttatgaactttaattctaagaacatttaatttctttctttctttcttcttccttccttccttccttccttccttcctttctttctttctttcttttttttttttttgacacagtctcgctctgtcacccaggctggagtgcagtggc

SEQ ID NO: 557736 - DNA, 201 bp, Homo sapiens
gggactacaggcgtgcaccaccatgccctgctcatttttgtatttttagtagagtcggggtttcaccatgttggccaggatggtctcaatctcttgacctsatggtccacccacctcggcctcccagattgcagggattacaggcatgagccactgcacccggcctttttatttttatttttttgaggcaaggtctcacgc

SEQ ID NO: 557737 - DNA, 201 bp, Homo sapiens
ccgttggcctatcctttatggcatttctcaaaatcatttgtacctttcaaattttatgaactttaattctaagaacatttaatttctttctttctttcttcttccttccttccttccttccttccttcctttctttctttctttcttttttttttttttgacacagtctcgctctgtcacccaggctggagtgcagtggca

SEQ ID NO: 557738 - DNA, 201 bp, Homo sapiens
tgacacatgtgcaaagacaggaagcagcacagtctcggcgggaggagaaaaaaagagcagagaaggagcgaatcatgaatgaggaagatcctgagaaacarcgcaggctggaggttagacaaacttatcactggggtaaaactacgatttgtaaggatgactgcttgtgttctgttggttgttaaggtaatctttgtaggc

SEQ ID NO: 557739 - DNA, 201 bp, Homo sapiens
ttggcctatcctttatggcatttctcaaaatcatttgtacctttcaaattttatgaactttaattctaagaacatttaatttctttctttctttcttcttycttccttccttccttccttccttcctttctttctttctttcttttttttttttttgacacagtctcgctctgtcacccaggctggagtgcagtggcatga

SEQ ID NO: 557740 - DNA, 201 bp, Homo sapiens
ctctttcaccaggctggagtgcagtggcgcgatctcagctcgctgcagcctccacctcccgggttcaagcgattcttctgcctcagcctccctagtagctrggactacaggcacatgccaccatgctcagctaatttttgtatttttagtagagatggggtttcaccatgttcaggatagtttcaatctcttgacctcgtg

SEQ ID NO: 557741 - DNA, 201 bp, Homo sapiens
gcaggagaggtttatagatttttactgtttataaaatctgatcagtatgtatagaatggcaatccattttggggttctctttttttttaagctttttttcwcaaggtgcaatgaaagccttccacactttctgtgttgtccttctggtgtttgggagtgtctctgaagccaagtttgatgattttgaggatgaggaggaca

SEQ ID NO: 557742 - DNA, 201 bp, Homo sapiens
tacctctttgaggctggcattgacaaagtggcatgctttcccatagattgtcccttgatactaacctgaaggatcaactagtataaaaagaatgtttagtyctcccttgatatgtatgggggattggttccaggaccccttgagaataccaaaatccatggatactcaagtcccttatataaaatggtgtagtatttacgt

SEQ ID NO: 557743 - DNA, 201 bp, Homo sapiens
tcaaaatcatttgtacctttcaaattttatgaactttaattctaagaacatttaatttctttctttctttcttcttccttccttccttccttccttccttyctttctttctttctttcttttttttttttttgacacagtctcgctctgtcacccaggctggagtgcagtggcatgatcttggctcactgcaatctccgcc

SEQ ID NO: 557744 - DNA, 201 bp, Homo sapiens
aatcatttgtacctttcaaattttatgaactttaattctaagaacatttaatttctttctttctttcttcttccttccttccttccttccttccttccttyctttctttctttcttttttttttttttgacacagtctcgctctgtcacccaggctggagtgcagtggcatgatcttggctcactgcaatctccgcctccc

SEQ ID NO: 557745 - DNA, 201 bp, Homo sapiens
tttcaaattttatgaactttaattctaagaacatttaatttctttctttctttcttcttccttccttccttccttccttccttcctttctttctttctttcttttttttttttttgacacagtctcgctctgtcacccaggctggagtgcagtggcatgatcttggctcactgcaatctccgcctcccaagtttaagcaat

SEQ ID NO: 557746 - DNA, 201 bp, Homo sapiens
gtggtctctgctcacggcaacctccacctcccgggttcaaacgcttctcgtgcctcagcctcttggatagctggggttacaggcacatgccaccatgcccrgctaatttttttgtatttttagtagagacggtgtttcactgtgttggccaggctgatctcaaattctcaaactccttgcctcaagtaatccacctgcctc

SEQ ID NO: 557747 - DNA, 201 bp, Homo sapiens
tgtccaaacagttctataagacagcaaagtattgctactctgaagctgtgatcattttgtggtcagggtagaggaacgtgaggtattcggccttgtttcctttttttttttttgagacagagtcttgctctgtcatccaggctggagtacaatggtgcgatttcagctcactgcaacctccgcctgccgggttcaagctat

SEQ ID NO: 557748 - DNA, 201 bp, Homo sapiens
ttttttttgagacagagtgttgctctgtcgcccagaccggagtacagtggcgtggtctctgctcacggcaacctccacctcccgggttcaaacgcttctcrtgcctcagcctcttggatagctggggttacaggcacatgccaccatgcccggctaatttttttgtatttttagtagagacggtgtttcactgtgttggcc

SEQ ID NO: 557749 - DNA, 201 bp, Homo sapiens
gcaacctccgcctgccgggttcaagctattctcctgcctcagcctcctgagtagctgggactacaggtacgcgccaccatgcccggctaattttttataattttttttttttttttttttagtagggacagggtttcaccatgctggccaggctggtctcgaactcctgacctcgtgatccacccacctcagcctcccaaa

SEQ ID NO: 557750 - DNA, 201 bp, Homo sapiens
tttgagaccagcctggccaacatggtgaaaccccgtctctgctaaaaatacaaaaatcagctgggtgtggtggcacatgcctgtaatcccagctactcggraggctaaggcaggagaatggcttgaacccggaaggcagaggctacaatgacccgagattgtgccactgcactccagcctgggtgacacagcaagacccta

SEQ ID NO: 557751 - DNA, 201 bp, Homo sapiens
ttattttgattattttataaaaggaatgatctatgaaatctgtgtaggttttaaatattttaaaaattataatacaaatcatcagtgcttttagtacttcwgtgtttaaagaaataccgtgaaatttataggtagataaccagattgttgctttttgtttaaaccaagcagttgaaatggctataaagactgactctaaac

SEQ ID NO: 557752 - DNA, 201 bp, Homo sapiens
cgttgtcaggaagacctaatctaaaatgacaacaaggaatgatggcctcactcagtcctctttcctcaagtctagactcagtcgctgaggaactattggaygagcttgcagaaaataatcaaaccagacttgttagcgcttgtgtgaattttccttggtcctgtgttgcttgcttcaggagtcatagaggctgggtggtct

SEQ ID NO: 557753 - DNA, 201 bp, Homo sapiens
cagactttttctcacccttcaaggccccacccgactcagacatccttccctgatcaaaccttccccaaatccctgaggcagcgggtggactcctcctctgrtctcccaagtccttgcatattgtcaccacagcacttccaactctgggtgcatgtggatctatggatctatgactagactatgagcttttgggaacaggga

SEQ ID NO: 557754 - DNA, 201 bp, Homo sapiens
cacggtctcaccacctggtgtggatgccaaagcccaggtgaagacagagaccgcggggccccaggggcccccacactacaccgaccagccatccacctcayagatcgcctacacctccctcagcctgccccactatggctcagccttcccctccatctcccgcccccagtttgactactctgaccatcagccctcaggacc

SEQ ID NO: 557755 - DNA, 201 bp, Homo sapiens
tatgactcctgttttctctctcacagatagtgagggtctgacatgcccatgccacctatgccacagtgcctaagggctaggccacccagagactgtgcccrgagctggccgtgtctcccactcaggggctgagagtagctttgaggagcctcattggggagtggggggttcgagggacttagtggagttctcatcccttca

SEQ ID NO: 557756 - DNA, 201 bp, Homo sapiens
agatcagccacgaggtaatgtccaacatggagacctttgatgtggctgagttggaccagtacctgccgcccaatgggcacccaggccacgtgagcagctamtcagcagccggctatgggctgggcagtgccctggccgtggccagtggacactccgcctggatctccaagccaccaggcgtggctctgcccacggtctcac

SEQ ID NO: 557757 - DNA, 201 bp, Homo sapiens
ggtctcgaattcctgacctcagcctcccaaagtgctgggattacaggcatgacccagcacgcccagcctcctatctcttactatatatatagtatatatakagagagagaaacaagtgcacaagaagtctgtgtgagatccagaggtggcatggccgtctatcccatccagtcaggtctccaagaacaccccactgcccac

SEQ ID NO: 557758 - DNA, 201 bp, Homo sapiens
cagcctggccaatatggtgaaacctcgtctctactaaaaatacaaaaattagccaggcatggtggtgcgtgcctgtagtcccagctacccgggaggctgargcaggagaatcgcttgaactcaggaagccgagattgcagtgagctgagaccgcatcacggcactccagcctgggcgacagagtgagactctgtctctaaa

SEQ ID NO: 557759 - DNA, 201 bp, Homo sapiens
aagagggcactcactggggtgtgaggggtggggcagctgaagagacaagccctctggactgacagacaaggctgctcccacaaagactcatggattctcastaccaaggtctgggattctagaatctggactttcccctcgaccccctctgtaaggtaccccatcctgccctcctcaccctggggcagccaaaccctaaat

SEQ ID NO: 557760 - DNA, 201 bp, Homo sapiens
agcccaggcggcggaagaacgggaaggccgcccagggcgaggcggagtgccccggtggggaggccgagcaaggtgggaccgccgccatccaggcccactasaagagcgcccacttggaccaccggcacccaggagagggctcccccatgtcagatgggaaccccgagcacccctcaggtgagtgctgatgacagagctgag

SEQ ID NO: 557761 - DNA, 201 bp, Homo sapiens
caagtagtcttcttatgcccctggcctagcaggacacaggtagcagcaatcagtgccccactgtgggaggtccccggttggggtttccagtttgggtgagsaatcagcctacctcttcttgcccccattccaaacctgggagaccagggagaaagagggctgacaggaaggtgcagatgaggactgggtttggagttagag

SEQ ID NO: 557762 - DNA, 201 bp, Homo sapiens
ctaattcactgggctccgaggccccagacacactggcccgattgtctggctggttgtgtgtgtgagcatgtgtgtgtgtgtgtgtgtgtgtgtgtgtgtgtgttccagtgtctgctccccccacccccaacatgcctctgcctcgtgtgactacctcattgtgtcccatttcccaccccctacacccctttggactttccc

SEQ ID NO: 557763 - DNA, 201 bp, Homo sapiens
cagagggtggctccctggaccctggaggggggtcctgagagacatttggatttgggctgggctggccaattgctccaggggcttctcctgaaacctccccragctgtgactcctgggatgtcaagaagtggggtggttaggtaggcagagctggaaaacaggtgtcttaaaaccaaaaagagaaagatacacacagactgt

SEQ ID NO: 557764 - DNA, 201 bp, Homo sapiens
cctaattcactgggctccgaggccccagacacactggcccgattgtctggctggttgtgtgtgtgagcatgtgtgtgtgtgtgtgtgtgtgtgtgtgtgtgtgttccagtgtctgctccccccacccccaacatgcctctgcctcgtgtgactacctcattgtgtcccatttcccaccccctacacccctttggactttcc

SEQ ID NO: 557765 - DNA, 201 bp, Homo sapiens
gtgggcagggatgtgttcgcagcaggggccccaaccacacacacacagcactggtcatctgacagcccttcccacccgccctgcaggcccacctgcctcayccaacactgctcagcaaaaagcccagcacagccctgagaggaaggcagtgtctgtgcggggacaagggagagagagagggagtggccccttctgtctagc

SEQ ID NO: 557766 - DNA, 201 bp, Homo sapiens
tcctaattcactgggctccgaggccccagacacactggcccgattgtctggctggttgtgtgtgtgagcatgtgtgtgtgtgtgtgtgtgtgtgtgtgtgtgtgttccagtgtctgctccccccacccccaacatgcctctgcctcgtgtgactacctcattgtgtcccatttcccaccccctacacccctttggactttc

SEQ ID NO: 557767 - DNA, 201 bp, Homo sapiens
tggacattggtgagatcagccacgaggtaatgtccaacatggagacctttgatgtggctgagttggaccagtacctgccgcccaatgggcacccaggccaygtgagcagctactcagcagccggctatgggctgggcagtgccctggccgtggccagtggacactccgcctggatctccaagccaccaggcgtggctctgc

SEQ ID NO: 557768 - DNA, 201 bp, Homo sapiens
gcctgttcttgccatgtgtttgctgaagacctggtgccccttcccctgccccttctcagccctcagtgccctgctcacccagggcaggcccagggctcagygaccagcccgctgtgtggacccagacagcccagttctgcccaagagcagaggtcacagctagctcctccacccaaggtccatccagatctgggtggggct

SEQ ID NO: 557769 - DNA, 201 bp, Homo sapiens
ctcctaattcactgggctccgaggccccagacacactggcccgattgtctggctggttgtgtgtgtgagcatgtgtgtgtgtgtgtgtgtgtgtgtgtgtgtgtgttccagtgtctgctccccccacccccaacatgcctctgcctcgtgtgactacctcattgtgtcccatttcccaccccctacacccctttggacttt

SEQ ID NO: 557770 - DNA, 201 bp, Homo sapiens
acacacacacacacatcaggagaccctggaccacatacagagcaaccacctcagaatgaaactggacacagactttttctcacccttcaaggccccacccsactcagacatccttccctgatcaaaccttccccaaatccctgaggcagcgggtggactcctcctctgatctcccaagtccttgcatattgtcaccacagc

SEQ ID NO: 557771 - DNA, 201 bp, Homo sapiens
gtggatcacctacactttgaggagtggtcaggaggttggggggaagcaagaagatgagaacaagagtgaggagcatctgggttccagaaaattagggcttygtcagaggagcccggctctcttccgctgccctcccccttgccagccacagttgggtagagattgggtctagaggcttagagtggtagaaggtgcaggagg

SEQ ID NO: 557772 - DNA, 201 bp, Homo sapiens
actcctaattcactgggctccgaggccccagacacactggcccgattgtctggctggttgtgtgtgtgagcatgtgtgtgtgtgtgtgtgtgtgtgtgtgkgtgtgttccagtgtctgctccccccacccccaacatgcctctgcctcgtgtgactacctcattgtgtcccatttcccaccccctacacccctttggactt

SEQ ID NO: 557773 - DNA, 201 bp, Homo sapiens
ctaacctgcttcccccttgcgctctctctctctgtctcccttctacccaggccagagccatggcccacccacccctccaaccaccccgaagacagagctgyagtcgggcaaggcagacccgaagcgggacgggcgctccatgggggagggcgggaagcctcacatcgacttcggcaacgtggacattggtgagatcagcca

SEQ ID NO: 557774 - DNA, 201 bp, Homo sapiens
gcgagagaaagagaaaacccttatcaaactcctaattcactgggctccgaggccccagacacactggcccgattgtctggctggttgtgtgtgtgagcatrtgtgtgtgtgtgtgtgtgtgtgtgtgtgtgtgttccagtgtctgctccccccacccccaacatgcctctgcctcgtgtgactacctcattgtgtcccatt

SEQ ID NO: 557775 - DNA, 201 bp, Homo sapiens
tctcaccctccagcccatgaaagatttgggggcagccctctgaggctgttattccttgggcctcacatctctcagtccacaaatcatagggcacagcccccaccccgggtcctgtcctctgggtgccccatcccagggcctcacatcttccaagatggacactcagagggaggccaacctggagtgctctggcattcacgc

SEQ ID NO: 557776 - DNA, 201 bp, Homo sapiens
attcctttcctctcctcctctctggggcccatcttctgagtaaatccgggacctgccttaacaaaagccaggctgagtcccaggaaaaccctgttgctccrgaaaggcctccttgggccatggaaggaagcctggatttccaccattacactcagaccgcagacccctctctgctgcagaataaacaccctgagagaaggc

SEQ ID NO: 557777 - DNA, 201 bp, Homo sapiens
ccgctgcctgaaggtgaaccatggaagttcacgtgcgcccacctgcctctaacctgcttcccccttgcgctctctctctctgtctcccttctacccaggcyagagccatggcccacccacccctccaaccaccccgaagacagagctgcagtcgggcaaggcagacccgaagcgggacgggcgctccatgggggagggcgg

SEQ ID NO: 557778 - DNA, 201 bp, Homo sapiens
aggcgtggctctgcccacggtctcaccacctggtgtggatgccaaagcccaggtgaagacagagaccgcggggccccaggggcccccacactacaccgacyagccatccacctcacagatcgcctacacctccctcagcctgccccactatggctcagccttcccctccatctcccgcccccagtttgactactctgacca

SEQ ID NO: 557779 - DNA, 201 bp, Homo sapiens
agctgggcaaggtcaagaaggagcagcaggacggcgaggcggacgatgacaagttccccgtgtgcatccgcgaggccgtcagccaggtgctcagcggctamgactggacgctggtgcccatgcccgtgcgcgtcaacggcgccagcaaaagcaagccgcacgtcaagcggcccatgaacgccttcatggtgtgggctcagg

SEQ ID NO: 557780 - DNA, 201 bp, Homo sapiens
ggaggctgagcggctccgtatgcagcacaagaaagaccacccggactacaagtaccagcccaggcggcggaagaacgggaaggccgcccagggcgaggcgkagtgccccggtggggaggccgagcaaggtgggaccgccgccatccaggcccactacaagagcgcccacttggaccaccggcacccaggagagggctcccc

SEQ ID NO: 557781 - DNA, 201 bp, Homo sapiens
cctgcttcccccttgcgctctctctctctgtctcccttctacccaggccagagccatggcccacccacccctccaaccaccccgaagacagagctgcagtmgggcaaggcagacccgaagcgggacgggcgctccatgggggagggcgggaagcctcacatcgacttcggcaacgtggacattggtgagatcagccacgag

SEQ ID NO: 557782 - DNA, 201 bp, Homo sapiens
tccctcaggaagaggacttgggagctggggggtgaagggtcactgctgaccggaggcagctctgccaggcagtgtcatcagtgggcttcacgtttgactgrcaggtattcctttcctctcctcctctctggggcccatcttctgagtaaatccgggacctgccttaacaaaagccaggctgagtcccaggaaaaccctgtt

SEQ ID NO: 557783 - DNA, 201 bp, Homo sapiens
gaataggaaagtgaacagacaaaggaacaaggaccagttttctaagtgccctcccatggaggaaggcagctcaaagaacaacagggcaacacaggccagcrtatgacggggctaagggcttgccagtgggctgggaagcagggtgggctcaggaggagggaagggttggaaaggacacaacatgaggccaggacagggagc

SEQ ID NO: 557784 - DNA, 201 bp, Homo sapiens
gagactgaggcagccggatgcagtggcaacagcctgtagtcccagctactcgagaggctgaggcgggaggattgcttgagcctaggaggtcaaggctgtakcgtgctatcattgcatctgtgaaaagccactgtacttcagcatgggcaacatagtgagaccttatctctaaaagaagaggaaagaaactgagactaagag

SEQ ID NO: 557785 - DNA, 201 bp, Homo sapiens
tcctgtgaggcgcagcagtgtggtccctgttggacagatgaggaaactgaggccctttgtaacttagggagttgggcggaattctgccctacccaccatcggggtggggttggagaggaagcctgggaggattgtccccctgtgtgagggttgaaacaccattcccagaggcagggtgtaggcaggtgtgtggggagcaaa

SEQ ID NO: 557786 - DNA, 201 bp, Homo sapiens
gaggcaggatggtactgggctggaagacaggactgtcctttagttctaaacagtcctcctattgttggacactcgggagtgttccacagtttggcttatcrgttactgtagccacagacgtcttccagcctgcagctttttgtctccagctggaattctcttcttgtgatcactttcccgggggacgcggactgggtcaga

SEQ ID NO: 557787 - DNA, 201 bp, Homo sapiens
tccgcctgcttcagactcccaaagtcctgggattacaggcatgagccacggtgcccagccagcttttctttttttttttaattttttaaatatatatgtawatttaagtagagatgggatctccctgttgcccaggctggtcttgaactcctgggctcaagcaatcctcccacctgtgcttcccaaagtgctgggattaca

SEQ ID NO: 557788 - DNA, 201 bp, Homo sapiens
agtgagactcggaagtgggctttctggctcgtgtcagcagccgatttgaccctggcacaatccacctccctggacttccagtttcagggcctgacgctgtscctgccgccctcctgctgactgcgtctccatctccctacaggcaccgggagcctggccgctgcagtggagacagcctcgggacgccaggccctggtggtg

SEQ ID NO: 557789 - DNA, 201 bp, Homo sapiens
atggtattgagtggagagaagtagacacaggattatggtggggtggtgagcagggcctagtgccaggggcacctaggaagacttcctggaggaggcatgaygcagggcagtgataatacaccaggagatgtaaacccagtgttatggcatggcagagagggattctgtagtccttggcctctcctggctgtgctgcacacc

SEQ ID NO: 557790 - DNA, 201 bp, Homo sapiens
gactgaggcagccggatgcagtggcaacagcctgtagtcccagctactcgagaggctgaggcgggaggattgcttgagcctaggaggtcaaggctgtagcktgctatcattgcatctgtgaaaagccactgtacttcagcatgggcaacatagtgagaccttatctctaaaagaagaggaaagaaactgagactaagagaa

SEQ ID NO: 557791 - DNA, 201 bp, Homo sapiens
ccatcctgctgtcactcccatagcctagagggggaggcagaggcttaacaaatacagcactgcgatcatgtttgtgcacagcttgatgcagctttcaaacrgtgtggtgtggtgtggtgtgtgtgtgtggtgtggtgtggtgtgacaatattaataaaagcccccatgatgtgtatgtctgaaataatgcaaatatctcac

SEQ ID NO: 557792 - DNA, 201 bp, Homo sapiens
taacctgtccacacacactgaccactgccagtcagcctctgctgccacctgcttttgtctgactcaaaccctccaccgtggaggggcctccttttgctccygcctcccctgcagggccaaattcgcaagatgacagcagtgaagagtgccctggaccggatgtcggtgttacagaggccaataatttttttatttttcgta

SEQ ID NO: 557793 - DNA, 201 bp, Homo sapiens
cctcaccctttccttcctcaacagccaagcgcccggcgccagcccggcccaccatgccgcccccccaggtctccggctcccgctcctcccctccagccccrcccttgccccctggctctggcagccctgggaccccccaagccctgccccgacgtctggttggcagcagcctccgagcccccacagtgccacccccgttac

SEQ ID NO: 557794 - DNA, 201 bp, Homo sapiens
gtaaaatgggcttccagaaacacccagcacaggccaggcagtttagaatgtgcttagtaaatggtgattatcatcatttgttcagggacattagcatgaasgccgaatgttctggcacaaagacacgtctgtgggacaggcacagtggacttattgtgtgaggcaggatggtactgggctggaagacaggactgtccttta

SEQ ID NO: 557795 - DNA, 201 bp, Homo sapiens
cctgccaagaacggtggagatggagtccagatgccggcatctggttgccgtctctacccttaaccactacagtgagactcggaagtgggctttctggctcstgtcagcagccgatttgaccctggcacaatccacctccctggacttccagtttcagggcctgacgctgtccctgccgccctcctgctgactgcgtctcca

SEQ ID NO: 557796 - DNA, 201 bp, Homo sapiens; identical to SEQ ID NO: 407069

SEQ ID NO: 557797 - DNA, 201 bp, Homo sapiens
ccgtcggagtcttacgctcttcaaatcggtctagctcaggggctggagccttctgtcgtgcaggaggggcctttcttttccgttcctccatgtccttcccygtggcaaagatattttggagtctttgtttctccttctccaaatcccctgtagggccaaaaagaaatggcctagttaggctgtaaagggtgcccttattca

SEQ ID NO: 557798 - DNA, 201 bp, Homo sapiens
tgacacatgagaattgcttgaacccgggaggcggaggttacagtgagccgagatagcaccactgcactccaacctgggcacagagtaaggctctgtctttaaaaaaaaaaaaaaaaaaaaagttttgtcaaaacttagcagagcaaggctaagaaagctcaggaacctggggcctcggcgatgcctgtagtggcaacttat

SEQ ID NO: 557799 - DNA, 201 bp, Homo sapiens
cactgcacgacaaagcattctatgaggcctcttgggctgcaggcggatgccttcacctgacaccctactgaaatttaaaaccctacatcctagccccattytgcactgagcatgccttctctatctttcctgcttcgttttttctatagcacttacgaccacctaaaattctatatattttattttattgttatccttcta

SEQ ID NO: 557800 - DNA, 201 bp, Homo sapiens
cttctatattagctgtatgataagaatttttgctggtttaataaaatttctgccctctgttaaatattttttcctctttctctttttttttttttttttttttttttttttttttttttttgagatggagcttccatcttgttgcccaggctggagtgcagtggcgcgacctcagctcactgcaatctccacctcctgggt

SEQ ID NO: 557801 - DNA, 201 bp, Homo sapiens
gagtgcagtggcgcgacctcagctcactgcaatctccacctcctgggttcaaggaattctcctgcctcagcctcccaagtagctgggattacagacatgcsccaccacgcccggctaattttgtacttttagtagagactgggtttctccatgttggtcaggctggtcgtgaactcctaacctcaggtgatctgcccacct

SEQ ID NO: 557802 - DNA, 201 bp, Homo sapiens
tttcaccctaagaccctctctgggtgctcccctctccacatagaagtgggctcccggaggcggtgaccactgctttacagccgcatccgcaccggtgccaygcagaaatactgcgcgatctgggctgctggagctggcagctagcgcctctcgctactatagaaacgcgcacacaccagtcagcgcatgcgcactttcccc

SEQ ID NO: 557803 - DNA, 201 bp, Homo sapiens
gtgagccgagatcgtgccactgtactccagcctgggtgacagcgcgagactccgtctcaaaaaaagctgggtgtggggaacacctgtggtcccagctattytggagactgaggcaggaggattgcttgagctcaggagttctggctgcagtgagctatgatcatgccactgtattacagaatgggtgacagaatgagagcg

SEQ ID NO: 557804 - DNA, 201 bp, Homo sapiens
cagttaatcattgtggttgaatacttgcctaaggcggtaagaaatcaaataagtaaatcctaaaacaggaagaaaggaatcatattcattcctgaattcaraaaactaaatgaacaggccacaggtcagaagtggtgggaagcaggcccagtggatacctttagacacatgtcctagtagggatgctcgggctttgcttct

SEQ ID NO: 557805 - DNA, 201 bp, Homo sapiens
ggatgattcctcggtactgtttgccctgtcccagggcctccatgtcagccaggaattctttcctctcctggatttccttcaccactggacagaggagaggrctgtcaggttcccatgagggatgcaggcagcgggttgcctctcttgaggagaggaagtggttctattgtcaaatagtgtttctaggccgggcgcggtggc

SEQ ID NO: 557806 - DNA, 201 bp, Homo sapiens
ctaaggcggtaagaaatcaaataagtaaatcctaaaacaggaagaaaggaatcatattcattcctgaattcagaaaactaaatgaacaggccacaggtcaraagtggtgggaagcaggcccagtggatacctttagacacatgtcctagtagggatgctcgggctttgcttctctgcggacggggctgtgagtctcagagg

SEQ ID NO: 557807 - DNA, 201 bp, Homo sapiens
gatctgaggtggaacagtttcatcccgaaaccattccccacacctccgtcagtggaaaaattgtcttccacgaaaccggtccctggtgccaaaaaggctgrgatcgctgctttaacggactgacctctgagcagctcgcaggtccccggggtgtaagtgatggtcttggggcggcgccggaacccagttcctttggtcact

SEQ ID NO: 557808 - DNA, 201 bp, Homo sapiens
tgaatacttgcctaaggcggtaagaaatcaaataagtaaatcctaaaacaggaagaaaggaatcatattcattcctgaattcagaaaactaaatgaacagsccacaggtcagaagtggtgggaagcaggcccagtggatacctttagacacatgtcctagtagggatgctcgggctttgcttctctgcggacggggctgtg

SEQ ID NO: 557809 - DNA, 201 bp, Homo sapiens
agaagtgggctcccggaggcggtgaccactgctttacagccgcatccgcaccggtgccacgcagaaatactgcgcgatctgggctgctggagctggcagcyagcgcctctcgctactatagaaacgcgcacacaccagtcagcgcatgcgcactttccccgctctgtcctgcctcccggaagtgatttcctctgggttacg

SEQ ID NO: 557810 - DNA, 201 bp, Homo sapiens
catgactggtccgtcggagtcttacgctcttcaaatcggtctagctcaggggctggagccttctgtcgtgcaggaggggcctttcttttccgttcctccakgtccttccctgtggcaaagatattttggagtctttgtttctccttctccaaatcccctgtagggccaaaaagaaatggcctagttaggctgtaaagggtg

SEQ ID NO: 557811 - DNA, 201 bp, Homo sapiens
ggaagtggtagatttcagttaatcctgagttctggaaaaataaaaaaaaaaggaccatctgactggtttcctctgcgccctgaatacccctaagccaacaygtgctgaggctcaagagcattggtacaaagtgcatggggatttgattagctaccttcccacctgccctgtgggctgcttgcgtccctctcccttgtcctc

SEQ ID NO: 557812 - DNA, 201 bp, Homo sapiens
gcacgcgagggatctaggttgcacgctccttatgagaatctaactaatacctgatgatctgaggtggaacagtttcatcccgaaaccattccccacacctycgtcagtggaaaaattgtcttccacgaaaccggtccctggtgccaaaaaggctgggatcgctgctttaacggactgacctctgagcagctcgcaggtccc

SEQ ID NO: 557813 - DNA, 201 bp, Homo sapiens
cacctgacgtggcagaaggctggtaggatgggctggcctgaggatggccctgcctggcagaggagtggactccagtggtcgagcttgggctaccctgcccrtctctggagacagattaagtggtggcaagacccttcctaagttcctcactccttctgtggtcaatgtcttccatttcccggagtttctgcaaagggcatc

SEQ ID NO: 557814 - DNA, 201 bp, Homo sapiens
tcaccctaagaccctctctgggtgctcccctctccacatagaagtgggctcccggaggcggtgaccactgctttacagccgcatccgcaccggtgccacgsagaaatactgcgcgatctgggctgctggagctggcagctagcgcctctcgctactatagaaacgcgcacacaccagtcagcgcatgcgcactttccccgc

SEQ ID NO: 557815 - DNA, 201 bp, Homo sapiens
gaggctcagagataaagtcacttgtccaaggtcacatagctagtaagtggcagaactgaggtttgaaccctggtctctgatcccagagcaggcattccccrtaactccagatggggtgggagtgtggggccatgttttggaatcagttgacaattcagtgtggccaaggcaaggaaattgggagccatagagcgtttgaac

SEQ ID NO: 557816 - DNA, 201 bp, Homo sapiens
gaccttcgacctctatgatgactggatgagggcagccaggtgaggatgttggaggagggaggggatggggaggaggaggatgcaaaggtgtagccctgcgmtggctgacaggtctctccactcccccccagcctgaaggagccaggggcccggctgcaggccctccaagaggtgtgcagccgcctaccccccgagaacctc

SEQ ID NO: 557817 - DNA, 201 bp, Homo sapiens
ctccaagaggtgtgcagccgcctaccccccgagaacctcagcaacctcaggtgagcccgagcccgcctccccagcctgccgcagagccagagcccagctgrggtcacggaccctgggaccctgggcttgagcctggccttgccactgtatcctaagaaatattactgaaaatgcagctttgatggattagtcatttatata

SEQ ID NO: 557818 - DNA, 201 bp, Homo sapiens
aggaggttgggggggagggggtgcagtggcttgaaacgatcccaagatagcctggctttaagacttgatattctgttgagactgaggacactcgggttctwaatgtggggtccatcatgagccccccgaaaatgtttggcatttttctggggacaagatggctagccttcattttctcaaaagggcctacagcccaaagaa

SEQ ID NO: 557819 - DNA, 201 bp, Homo sapiens
gaggcaattctggcattttggccagtggtggtgatgaggtgtttagtggcatgggggagctgggagcccagagatcgggttcttttttttttttttttttttgagatggagtcttgctcttgttgcccaggctggagtacagtggcgcaatctcggctcactgcaacctccgcctcccgggttcaagcgattcttctgcct

SEQ ID NO: 557820 - DNA, 201 bp, Homo sapiens
aggcaattctggcattttggccagtggtggtgatgaggtgtttagtggcatgggggagctgggagcccagagatcgggttcttttttttttttttttttttgagatggagtcttgctcttgttgcccaggctggagtacagtggcgcaatctcggctcactgcaacctccgcctcccgggttcaagcgattcttctgcctc

SEQ ID NO: 557821 - DNA, 201 bp, Homo sapiens
agcagctactattcaggataccacagagcactgcggctcacaccttgaatttcctgatgagcaagacaaatgctcacatttcagggcacagggagagagasagacagcatcaagcacagccaccagtgcgttctctctatagtgtcaggtggagaggcgctgctaagggagggggagcaggttaagggggagcgtgggggc

SEQ ID NO: 557822 - DNA, 201 bp, Homo sapiens
atggcttgaaccggggaggcagaggttgcagtgagccaagatcgtgccattgcactccagcctgagcaacaagagtgaaactccatctcaaaaaaaaaaaraaaaagaaaaagaaatggccgggtgtggtggctcacacctgtaatcccagcactttgggaggctgaagcaggtggatcacttgaagtcaggagtttgaga

SEQ ID NO: 557823 - DNA, 201 bp, Homo sapiens
cccagcactttgggaggccgaggtgggcagaagatcgcttgagaccaggagttcaagaacaacatgacaaaaccccgtctctactacaaaaaaacaacaamaaaaaaatctgggcatggtggtgtgtgcctataatcccagctactccagaggctgaggcaggataattgcttgaactttggaggtggaggctgcagtgag

SEQ ID NO: 557824 - DNA, 201 bp, Homo sapiens
ccaggcccagctggatgcagcctccgtgtcttccatccaggtggtgggcgtcgtcgaggcgctgatccagagcgcagacaccctcttccctggaggtgaarctcctgcctgcatggacgccctgctgggtgccctccttctgccctgctccctcccctgtagccccacaaactcaccataagtccaggaggaagtctgagc

SEQ ID NO: 557825 - DNA, 201 bp, Homo sapiens
gagagatgtgacggatgatttcagatgtgtgcctggacagtcagtggcaggtggtaccaccttgaggacatgaagggggggtgcccctgcctgactgctcrgggtgggaaggccctgggccgctgatctgtttcatccctgcagaccactccccttcgatgacagccacccacttccccagggtgtatggggtgtcgctgg

SEQ ID NO: 557826 - DNA, 201 bp, Homo sapiens
agcactggggccctcattctgtcccaaaccgcccacttgctgccctttccgggtgcctgtaattccctcattcgagcccagctccctgggagaagacatgrctgcctcctgcggcatccacactacctcccccgtgtcaatgctcgcgtgggccaagcgctgtactagaagcctttgcattccaggctccatttcacaatt

SEQ ID NO: 557827 - DNA, 201 bp, Homo sapiens
agagttcaggggctgaatgccagagccaggggccactggggctctaagatggtggagggggcgtctgctctcaaggaccctatagaaggctcagcttcccycacttccgctcagggtgtcccttcatccccacagctcctggagattcaggccgattaccatcgcaggtcactgagctcgctggacacagccctggctgag

SEQ ID NO: 557828 - DNA, 201 bp, Homo sapiens
cactggggccctcattctgtcccaaaccgcccacttgctgccctttccgggtgcctgtaattccctcattcgagcccagctccctgggagaagacatgacygcctcctgcggcatccacactacctcccccgtgtcaatgctcgcgtgggccaagcgctgtactagaagcctttgcattccaggctccatttcacaatttc

SEQ ID NO: 557829 - DNA, 201 bp, Homo sapiens
cctctgaggaacttccgtccactgccgtgcccaccccagccaccaccccggctccggctccggctccagctccagctccggccccagccttggcttcagcrgctaccaaggaaaggtgaggactgaggggcttgaatggctcctgtggtactcccacaatcagcctgcctgaggcgccatgtctcagagctggaagctgaa

SEQ ID NO: 557830 - DNA, 201 bp, Homo sapiens
ggccactcagcgtcatcatctggaaaatgcagactgtaacaatctctaccctgtagggtggctgctgaggactcagcttggctcagtgcccactgcagggytggcactcagtggataagctgatttaactgtgacaatgttaagaccattctgggcggtgtctttcacactctttggaaaccctgggctggagaattctca

SEQ ID NO: 557831 - DNA, 201 bp, Homo sapiens
gaggcgccatgtctcagagctggaagctgaatttttggaaatgtaattattagtgttttcatcccaaagaccggatctcctagtttggagagggtggggcrgagactcagaggcggaatttgtctcagccactgatgtgtgccctattcatcatgtagcaatttcctgagcacctactatatgccaggctttgtttccagt

SEQ ID NO: 557832 - DNA, 201 bp, Homo sapiens
ggtggttagcgtatctgtgagggtgtgcccgcgtgtgtcacagctggtgctggggcaaccctaaagcctgggatcctgtaaacagtcctgcggcagccctrttctcccctctgtggagtggctgtgatcaccaaatctgccaccagggggcaacccagagcactcatggcccagcctgggcagaggccccggccagtggag

SEQ ID NO: 557833 - DNA, 201 bp, Homo sapiens
tgatttaactgtgacaatgttaagaccattctgggcggtgtctttcacactctttggaaaccctgggctggagaattctcagggctgggtgcgttctgccmctggcctaagcctgcctccgcccttaggtacctgatgaagttcctggcacggctggccgaggagcaggaggtgaacaagatgacacccagcaacatcgcc

SEQ ID NO: 557834 - DNA, 201 bp, Homo sapiens
gagctcgctggacacagccctggctgagctgagggagaaccacggccaagcaggtggggacataggcccggcgataccacacccctgaccctgccctgctyggggcttattgagaagctcgcacttcatcctgaaaggtagcaggaagctgtggatgggttctgagagctaggctcaatctgtgatggagaggcagctctg

SEQ ID NO: 557835 - DNA, 201 bp, Homo sapiens
gcctcgtgaccagggctggtaggtagtctacagtaaaataaaaatgaacaagataggccggggacagtggcttacacctgtcatcccagcactttgagagrccgaggcaggaggctagcttgagccctggagttcaagaccagcctggacaacacagcgagaccctgtctcaaaatttaagaacttttaaaaattcaaaat

SEQ ID NO: 557836 - DNA, 201 bp, Homo sapiens
atggtgaaactccgtctctactaaaaatacaaaaattatctgggcgtggtggtacgcgcctgtaatcccagctactcgggaggctgaggcaggagaatctyttgaacctgggaggtggaggatgcggtgagccaagatcgggccactgcaccccagcctgggtgagagagcaagactctgtctcaaaaaaaaagaagaaat

SEQ ID NO: 557837 - DNA, 201 bp, Homo sapiens
ctctcagatctgcagctctaaatcctagaatcccatgtggtctgctgtatggaggggacacttggctctggacatgcaacagggcaggtgaccagctcacsttgggatcatctccaggctcagtcaggcaaccaagaattcaggcagcagtcaaggcctaggaggcagcccgggtagtcacagccatacgaccatggccaa

SEQ ID NO: 557838 - DNA, 201 bp, Homo sapiens
ccagcctggacaacacagcgagaccctgtctcaaaatttaagaacttttaaaaattcaaaataaatgggcaagataatttcagagaacaaaaagtcctgcraagaaaatacatctggaaaatgtgacggagcagctggggtggggcatggggtgggactctaactagggtgctcggggagggcctccaagggggcaaaggg

SEQ ID NO: 557839 - DNA, 201 bp, Homo sapiens
agatggagttcactctgttgcttaggctggagtgcaatggcgagatcttggctcacttgcagcctcccgggttcaagcaattctcctgccttagcctcccraatagctgtgacttcaggcgtgcaccaccatagccggctaatttttgtattttcagtagagacagggttaccccatgttggccaggctggttttgaactc

SEQ ID NO: 557840 - DNA, 201 bp, Homo sapiens
tgcaacagggcaggtgaccagctcaccttgggatcatctccaggctcagtcaggcaaccaagaattcaggcagcagtcaaggcctaggaggcagcccgggyagtcacagccatacgaccatggccaacaaggtggagacgctgaaggaggaggaggaggagctgaagaggaaagtggagcaatgcagggtgagggccatgg

SEQ ID NO: 557841 - DNA, 201 bp, Homo sapiens; identical to SEQ ID NO: 557793

SEQ ID NO: 557842 - DNA, 201 bp, Homo sapiens
taaggaagaaacgaccaagcagagacccgaaggcagtgaggaatgagcctaggaccccctctgcttctcacccactctctggcttccagtggccaaagcakctcataaagatcacgtggcccggcacggtggctcacgcctgtaatcccagcactttgggaggccgaggcaggcgagatcgagaccatcctggctaacacg

SEQ ID NO: 557843 - DNA, 201 bp, Homo sapiens
ggacacagtcagtgacaggctggcctctgaggaacttccgtccactgccgtgcccaccccagccaccaccccggctccggctccggctccagctccagctmcggccccagccttggcttcagcagctaccaaggaaaggtgaggactgaggggcttgaatggctcctgtggtactcccacaatcagcctgcctgaggcgcc

SEQ ID NO: 557844 - DNA, 201 bp, Homo sapiens
caaactcaccataagtccaggaggaagtctgagcctcagtttctcatttttacaacggggatggtctgcctgctttgtggggtggtggtgaggctcacacrggagtggggaagctgaacatggtccagatgggttcaggggaaggggaaacggtcccggccagtggagtgaggagcctggcgcggtctctgagagccgtct

SEQ ID NO: 557845 - DNA, 201 bp, Homo sapiens
tgctgggtgccctccttctgccctgctccctcccctgtagccccacaaactcaccataagtccaggaggaagtctgagcctcagtttctcatttttacaayggggatggtctgcctgctttgtggggtggtggtgaggctcacacgggagtggggaagctgaacatggtccagatgggttcaggggaaggggaaacggtcc

SEQ ID NO: 557846 - DNA, 201 bp, Homo sapiens
cccaggaggcggaggtcacagtgagccaagatcatgccatcgcactccagcctgagcgacagagcgagacttctcaacaacaataacaaaaaaaaacaagsctaggtggcgcacacttgtaatcccagcactttgggaggccgaggtgggcagaagatcgcttgagaccaggagttcaagaacaacatgacaaaaccccgt

SEQ ID NO: 557847 - DNA, 201 bp, Homo sapiens
gagggcagccaggtgaggatgttggaggagggaggggatggggaggaggaggatgcaaaggtgtagccctgcgctggctgacaggtctctccactcccccmcagcctgaaggagccaggggcccggctgcaggccctccaagaggtgtgcagccgcctaccccccgagaacctcagcaacctcaggtgagcccgagcccgc

SEQ ID NO: 557848 - DNA, 201 bp, Homo sapiens
ggacccccccaccggactctccactctccggcaggtcctaggggagccaccggaaggaaggagaggtttgcctgctcctacgggactgattcttctcttgycgacatgttttttgtaaggctggtaaataaattattttggacaaaactggagcagctgcccaaatgatagttttattttctgtccttgaaataaagaagc

SEQ ID NO: 557849 - DNA, 201 bp, Homo sapiens
gagaccgctgagttcctgggtgaggacctgctgcaggtacgtgcctgggccgggcaggtgggaaggcaggcctgtgcaggctgtctcggagcagagggccrgggcggggacgccaggtaggggcctgggttgagtcattcctcaagctgttggccatggggtccccaggggacaggagaaagtttcctgctcagggggaga

SEQ ID NO: 557850 - DNA, 201 bp, Homo sapiens
ttaccccccacaccccctcagcctgcccggcgccaaagccggcgttcaccagcctcccccagcccggcctccccaggtccagcctcccccagcccagtctytttgagtaaccctgcacaggtggacctgggggctgccacagcagagggaggagcccctgaggctatcagtggggtccccactcccccagctatcccccct

SEQ ID NO: 557851 - DNA, 201 bp, Homo sapiens
gagccctgggcaggaggttgggggggagggggtgcagtggcttgaaacgatcccaagatagcctggctttaagacttgatattctgttgagactgaggacrctcgggttcttaatgtggggtccatcatgagccccccgaaaatgtttggcatttttctggggacaagatggctagccttcattttctcaaaagggcctac

SEQ ID NO: 557852 - DNA, 201 bp, Homo sapiens
gcctcggacccccacagcctggaggagttctgctccgacccgcacgctgtggcaggtgcctgatccggggagccctgggcaggaggttgggggggaggggrtgcagtggcttgaaacgatcccaagatagcctggctttaagacttgatattctgttgagactgaggacactcgggttcttaatgtggggtccatcatgag

SEQ ID NO: 557853 - DNA, 201 bp, Homo sapiens
gaggcgctgatccagagcgcagacaccctcttccctggaggtgaagctcctgcctgcatggacgccctgctgggtgccctccttctgccctgctccctccsctgtagccccacaaactcaccataagtccaggaggaagtctgagcctcagtttctcatttttacaacggggatggtctgcctgctttgtggggtggtggt

SEQ ID NO: 557854 - DNA, 201 bp, Homo sapiens
ggggaggaggagccgggcacaacctgtggacggccgcggccggcggacacacagcagcgggggcccggccgggggtcgcccgggggcccggaagccggggragagcgaggaaaccaacttggagagaggagtgacctgggggccgggggcggagtcgtgagcgggggaggagagagccggccgccagcaagagccgcgcgg

SEQ ID NO: 557855 - DNA, 201 bp, Homo sapiens
tcaggcctcttctcagctgttaccctccaggacacagtcagtgacaggctggcctctgaggaacttccgtccactgccgtgcccaccccagccaccacccyggctccggctccggctccagctccagctccggccccagccttggcttcagcagctaccaaggaaaggtgaggactgaggggcttgaatggctcctgtggt

SEQ ID NO: 557856 - DNA, 201 bp, Homo sapiens
taatcaagaggcagcgtttattggctgataaccgccagcttgttactaacatatgagtgcactgtctcatggaacactggcacaaccctaggggcaggcaytgctttacacatgaggaactggaggctcagagataaagtcacttgtccaaggtcacatagctagtaagtggcagaactgaggtttgaaccctggtctctg

SEQ ID NO: 557857 - DNA, 201 bp, Homo sapiens
ccagtggagctctcagatctgcagctctaaatcctagaatcccatgtggtctgctgtatggaggggacacttggctctggacatgcaacagggcaggtgaycagctcaccttgggatcatctccaggctcagtcaggcaaccaagaattcaggcagcagtcaaggcctaggaggcagcccgggtagtcacagccatacgac

SEQ ID NO: 557858 - DNA, 201 bp, Homo sapiens
gccccggccagtggagctctcagatctgcagctctaaatcctagaatcccatgtggtctgctgtatggaggggacacttggctctggacatgcaacagggyaggtgaccagctcaccttgggatcatctccaggctcagtcaggcaaccaagaattcaggcagcagtcaaggcctaggaggcagcccgggtagtcacagcc

SEQ ID NO: 557859 - DNA, 201 bp, Homo sapiens
ccagcctgggcaacttaatgagaccctgtctctacaaaaaattaaaaagattagccaggcatggtgcacacctgaagtctcagctactcagaaggctgagrtgggaggactgcttgggcccagggagtcaaggctgcagtgagccatgatggagccactgcattccagcctgtgtgacacaatgagaccctgtctctaaaa

SEQ ID NO: 557860 - DNA, 201 bp, Homo sapiens
aaggcacaggccagcttagcctgggtgctcagaggacctcggctggggtacacgtttgggggctgggagaccgttgctgaaggcagcgatcatgtggcggsggcactaggcggagtcagacggtcacgtgattgggaggggatcacgtgacggagggcggctgaggagcgcggggtggctgcctttaagtcacgtgacatg

SEQ ID NO: 557861 - DNA, 201 bp, Homo sapiens
ggctagggcgtggggagggcctggtctctagggttccgggcgtcctgtggcaggggctcctcttttcacatggcctctctccacagagaagtacaacttcytgggtatctccattgttggccagagcaatgagcggggagacggaggcatctacattggctccatcatgaagggtggggctgtggcggccgacgggcgcat

SEQ ID NO: 557862 - DNA, 201 bp, Homo sapiens
gtctctagggttccgggcgtcctgtggcaggggctcctcttttcacatggcctctctccacagagaagtacaacttcctgggtatctccattgttggccaragcaatgagcggggagacggaggcatctacattggctccatcatgaagggtggggctgtggcggccgacgggcgcattgagccaggggacatgcttttgc

SEQ ID NO: 557863 - DNA, 201 bp, Homo sapiens
ggacttttttaataggcatttcctcttttatatgaagaattcccatccattgggccccttctaaccccagaatgtgacctcctcctccagttacccacagmcctgccctttgcagggttgggggtggtcagcggtaccccggggttaggcatcctagacagcagcctgaggaagctgggagatttgggccatgtagctgcc

SEQ ID NO: 557864 - DNA, 201 bp, Homo sapiens
ctgggggccacaggactggtggcccctcaaggctggagcgccacctggccggatacgagagctcctctaccctcatgaccagcgagctggagagtaccagyctgggggactcggacgaggaggacaccatgagcaggtgtggctccgcacagctctccccagcgcacccagccccgtctcgtcttccagtcaatcctcttg

SEQ ID NO: 557865 - DNA, 201 bp, Homo sapiens
cactggccgaggatgggggctgacgtccacccatgtgctgctggacaagccatgtgccaggtgcaggactgtgtccaccgggggaaggtgcacctcttacytgagtcccgcaaagacgtgggctagtggctgtgcccctgccctcatggcagaagtagatgggagtttcttgtcagagacccttgtgaacccctgttttga

SEQ ID NO: 557866 - DNA, 201 bp, Homo sapiens
gcagccgcatcagcgtgcgggattgcttttgaaactggactaagaggtttgagtcagactcaaggaagtctttggagcagcactgtgcccctgagggtgcrttagggagaggagaaataaggaaaggggattgagtttggagatttcttaggtgtcggagtgagttctttcaatgtaagagaagacctgaacagggcagga

SEQ ID NO: 557867 - DNA, 201 bp, Homo sapiens
agccctgccctttgcagggttgggggtggtcagcggtaccccggggttaggcatcctagacagcagcctgaggaagctgggagatttgggccatgtagctrcctttgttactctatttattttagtcacttgtataaaacaccaaataaagcaatagaggcaaactccccacgcctctggctcctttctttgggagggagg

SEQ ID NO: 557868 - DNA, 201 bp, Homo sapiens
aggcccgaggagcgggcccccgagtccaagtccggcagtggcagtgagtctgagccctccagccgagggggcagccttcggcggggtggggaagcaagtgrgactagcgatgggggccctcctccatccagaggctcaactgggggtgcccctaatctccgagcccacccagggctccatccctatggaccgccccctggc

SEQ ID NO: 557869 - DNA, 201 bp, Homo sapiens
tcaatgacaacgatggctccagtggggcttcagaccaggataccctggctcctctgcctggggccaccccctggcccctgctgcccactttctcctaccartaccctgccccacacccctacagcccgcagcctccaccctaccatgagctttcatcttacacctatggtgggggcagtgccagcagccagcatagtgagg

SEQ ID NO: 557870 - DNA, 201 bp, Homo sapiens
cgagagcaggagttggaagaagaacctgaggcctttttccactgtgggtgctcccaggctcggatgtggttgactggctctaccatcacgtggagggcttycctgagcggcgggaggcccgcaagtatgccagcgggctgctcaaagcaggcctgatccgacacaccgtcaacaagatcaccttctctgagcagtgctatt

SEQ ID NO: 557871 - DNA, 201 bp, Homo sapiens
cagaggccaccccgcctggagagggtgaggggttcctacaggaaggctggtgctgggagaaggtggggcatgggctttggtttgggcggtgccaggacacyggcagcaccccagggttgaccctgggttattgaagggcactctggctccttttcccaccacagacgtcatccttcagcagcgtcacagattccacaatgt

SEQ ID NO: 557872 - DNA, 201 bp, Homo sapiens
cagtccatgagcctcgggcagaactggcgcctccagccccacctttacctcctttgccacccgagaggaccagcggcattggggactcaaggcctccatcyttccagtgagtccttcagattcttgactgcaggggagggaggtgaggagggaacccaggcctttggtaggggacgcctaggatccggagccctgttctcc

SEQ ID NO: 557873 - DNA, 201 bp, Homo sapiens
ccacaatgtctctcaatatcatcacagtcacgctaaacatgggtatggggagagcctgtggctagggcgtggggagggcctggtctctagggttccgggcrtcctgtggcaggggctcctcttttcacatggcctctctccacagagaagtacaacttcctgggtatctccattgttggccagagcaatgagcggggagac

SEQ ID NO: 557874 - DNA, 201 bp, Homo sapiens
ccggggttaggcatcctagacagcagcctgaggaagctgggagatttgggccatgtagctgcctttgttactctatttattttagtcacttgtataaaacmccaaataaagcaatagaggcaaactccccacgcctctggctcctttctttgggagggaggcaggcagcagggggaaagaaccgtcacacaggagcaaagc

SEQ ID NO: 557875 - DNA, 201 bp, Homo sapiens
agaggccaccccgcctggagagggtgaggggttcctacaggaaggctggtgctgggagaaggtggggcatgggctttggtttgggcggtgccaggacaccrgcagcaccccagggttgaccctgggttattgaagggcactctggctccttttcccaccacagacgtcatccttcagcagcgtcacagattccacaatgtc

SEQ ID NO: 557876 - DNA, 201 bp, Homo sapiens
ttgagccccatcgtgggtgggtctgggagaactgttcccagttcctctccattcggtgtcttggggccctagcctcttgaagcagtgatttcttcctctcytcccttgctttccagacctagtcaacctgtctctcaatgacaacgatggctccagtggggcttcagaccaggataccctggctcctctgcctggggccac

SEQ ID NO: 557877 - DNA, 201 bp, Homo sapiens
ggcaggagaaagtcaacatcctggagccaggtgaagattgggagaaagtttgatgggggtcggggtggggatggttggtccagctcactgacctctacctygtcgcttggcagggtggtgaaggaagaaatttcagatgacaacgcccgcctcccctgcttcaacggaagggtggtatcctgggtaagaggttctgacacc

SEQ ID NO: 557878 - DNA, 201 bp, Homo sapiens
cccaaagaatggagagtcctcagtcctacttttctcatctttcccctagtaaagctgccccaggtgtttaaaatcctgggagccaagagtgctgaagggtygagtctccagtctgtaatgctggagctagtggcattgactgggaccatggtctacagcatcactaacaacttcccattcaggtgaggggcccacccttcc

SEQ ID NO: 557879 - DNA, 201 bp, Homo sapiens
ccaaaattttgacatttgagtgctttcgtaagccctgtacatgtactattaattcagtcattcagccaagcctcctcctctagcagcaatttccagctgtktaacactatcctgggcaaatgttttaccctgtcctccagcctccctgcttcccttctggccctggaagactgagtctggacggcagagtggagggactgg

SEQ ID NO: 557880 - DNA, 201 bp, Homo sapiens
tcctgctgcagtgaggggaacagatgggacaataaagactggagactcagttgaataatacaaaactgtttaatactaccaaaaatataattgtatgttgygcggctctccctggctatcatgggaggactgcaggctgcctctgaactgtagtccaacaggagaaagggttgacagcctggggtaggggatgctgctgga

SEQ ID NO: 557881 - DNA, 201 bp, Homo sapiens
tgcttgaacccaagaggcagaggctgcagtgggctgagattgggccactgcactccagcctgggtgacagagcaagactctgtctccaaaaaaaaaaaaaagtgtggtggtttggagcaggaaggaccaggactttctcactgccctccgcctctcctccccccaagacaatgcaagaccctggtgtgggtaagggggctc

SEQ ID NO: 557882 - DNA, 201 bp, Homo sapiens
ctgagacttattttacgccactagagtgagggtgggtagcgtcagaaagagcggggcacggggcgggccagcttcgccgcgggaaaagaacgggaggcggrgtgtccgcagcgcgcacgcgcaacgaaagtcaatggcggtctggagagactggcggaagctagctttgcaatatggcggccgaggcggacggaccgctta

SEQ ID NO: 557883 - DNA, 201 bp, Homo sapiens
tagagacgctgagagaacgggagctagtagcgcccccacccaacgccacctcggagactccggctccttctctctcaacttcgaacaatacaaagtgtgcyaggagaagacaagatggcgcccagcaggaggagcggagaaaggcaggggtgtaaatctggcttccaaactggaagcgtcaacaaaggcgtgggaggtcta

SEQ ID NO: 557884 - DNA, 201 bp, Homo sapiens
ttgactgtagtcaccctgctccaggcctccaatgtgcctgctgtggtggtggggagggtgggtaccaggagcaagggacaagatgttgtgggggcagggtsggggggaagagtagaagatcaaagtgtgggggtgttgtacttgggggagcatgggaagagctcaggtgacagagccaaaggtctcaactcctcccctagc

SEQ ID NO: 557885 - DNA, 201 bp, Homo sapiens; identical to SEQ ID NO: 409548

SEQ ID NO: 557886 - DNA, 201 bp, Homo sapiens
catcccaaagaatggagagtcctcagtcctacttttctcatctttcccctagtaaagctgccccaggtgtttaaaatcctgggagccaagagtgctgaagrgttgagtctccagtctgtaatgctggagctagtggcattgactgggaccatggtctacagcatcactaacaacttcccattcaggtgaggggcccaccct

SEQ ID NO: 557887 - DNA, 201 bp, Homo sapiens
tcttcgacccttggctcaagaccaccctggacatactcagcttcagctgaagagggagtcccaagaccaggggcagatccagccctggccccgacccagargacaacaccaccttctgcagagtgtgtgggaaagggacggtagagagagagggaagaatgagccgggcctactgcctgtggcctcacccctagctgcctt

SEQ ID NO: 557888 - DNA, 201 bp, Homo sapiens
ttaagaagggacctgccccccgcctctcagttatcttcccttatccatttattacagggcctaaacagtctagcagtagaaatcacccactccctgacccwttttattttattttattttattttattttattttattttagacagagtcttgctctatcacccaggctggagtgcagtggcgtgatctcggctcactgct

SEQ ID NO: 557889 - DNA, 201 bp, Homo sapiens; identical to SEQ ID NO: 407648

SEQ ID NO: 557890 - DNA, 201 bp, Homo sapiens
cagaccgggcttggtgggtcacatctgtaatcccagcactttagaaggctgaggcgggcagatcacttgaggtcaggagttccagaccagcctggccaacrtagtgaaaccccgtctctactaaaaatacaaaaattagccaggtatggttgcccatgcctgtaatcccagctactccgagggtgaggcaggagaatcgct

SEQ ID NO: 557891 - DNA, 201 bp, Homo sapiens
cttggtgaggtcaaaggtcatgacagcgataggctcttgtcctgggccattgctgaggtggacagccggagggtcgtgggcactctatcagaaagagaaarcaaacaaagctgagtagggacatgtcagagacagacagagggagaggccctgctacagggccagaggagagaagggaagactgcatgagctgagtgccct

SEQ ID NO: 557892 - DNA, 201 bp, Homo sapiens
ctacagggccagaggagagaagggaagactgcatgagctgagtgccctgtcccgctcctgcacctgggtggggagaacaggtctcagggcccatccctggygggtgtgacgcagtagtagcaacagcagcaacagcagcaggcgcgaggtagccagtgggcctctgctctccataatcagccactgtccactcggcggctc

SEQ ID NO: 557893 - DNA, 201 bp, Homo sapiens; identical to SEQ ID NO: 407653

SEQ ID NO: 557894 - DNA, 201 bp, Homo sapiens
acccctctggggatcaatggggtgaaggacagagtcccctccactatcatcctccactgccgagaaagtttctgaactgggagaggatattccatctcccytctcctcctctagggcctgatctaggtcctccaagatttctgtccactcggggagcctgcattcacaggcctgaggtctagaaacagtcctcccctgcgt

SEQ ID NO: 557895 - DNA, 201 bp, Homo sapiens; identical to SEQ ID NO: 407655

SEQ ID NO: 557896 - DNA, 201 bp, Homo sapiens
gtcccaagtagcatcctgtatcaggactagaaatgagataatggaatcctaaatttctagctgagtgaccttgggcaagtcacttcacctttgtgcttcartgtccttgtctgtaaaatgaggaaaataatactttacggggtgactgtgaaagagggttcattgagaaaatgcaggcacagtgcctggcatctggtctga

SEQ ID NO: 557897 - DNA, 201 bp, Homo sapiens
ggttctggaaggacacagaaggaaagattgtgtatgtcatgtgtcctttgagaaccagtgtgggtttgggggagatggtgttcacagataaggaaaggaaracagggaaaagagaagagctgatggagagagggcagaaccaggggactgggtcaagggctaggccaaccccatactttgtgatcttggtgaggtcaaagg

SEQ ID NO: 557898 - DNA, 201 bp, Homo sapiens
ttatatactgactgagccttagaattcccatcagaaaagatggggccaagaatagctactttgtgggggttcgtgtggattaaacgagatgacagtggtaragggatgcccaataacttggttttgttccctttcctcagaccagctccagacatccctcccctgaggaccagagctagcttacctggtgccatctcccat

SEQ ID NO: 557899 - DNA, 201 bp, Homo sapiens
cctcccctgcgtcccaagtagcatcctgtatcaggactagaaatgagataatggaatcctaaatttctagctgagtgaccttgggcaagtcacttcacctytgtgcttcagtgtccttgtctgtaaaatgaggaaaataatactttacggggtgactgtgaaagagggttcattgagaaaatgcaggcacagtgcctggca

SEQ ID NO: 557900 - DNA, 201 bp, Homo sapiens
aaaggccattcaggcaaaaagaggtggaagagtcttctcctagagggaggtagtgcaaaggtggcattagagcattaaggtggctcggatccagaatcttmtccccacttttccactcctccaacctgagtttgcaaaagcactaccttccactgcccccatatcttcttcttgtggcctattcttcttccctcccagagg

SEQ ID NO: 557901 - DNA, 201 bp, Homo sapiens
agagacgcccttgaggcttggcccagaggttaaggaggggagccaggcctaagggaggcagggcaagggccttcatcttcgacccttggctcaagaccacyctggacatactcagcttcagctgaagagggagtcccaagaccaggggcagatccagccctggccccgacccagaagacaacaccaccttctgcagagtgt

SEQ ID NO: 557902 - DNA, 201 bp, Homo sapiens; identical to SEQ ID NO: 407652

SEQ ID NO: 557903 - DNA, 201 bp, Homo sapiens
cattagagcattaaggtggctcggatccagaatcttctccccacttttccactcctccaacctgagtttgcaaaagcactaccttccactgcccccatatmttcttcttgtggcctattcttcttccctcccagaggtttccttcccctcaaaatgtgccgcctcccttgagctgtttccaatgttgtgctcatgaacttg

SEQ ID NO: 557904 - DNA, 201 bp, Homo sapiens
gtttttgctcattaagacaactcaatacttggcacagtgcctggtacattgctagtgcacagtgaatatttgttgaataaatgaataatcagtaactttcaaagggggttcttaggtggagctttaatgggaagcgtcagtgccattgcctgggctctgggggcagctgtgagtccagatctcatggcttctgttcagggc

SEQ ID NO: 557905 - DNA, 201 bp, Homo sapiens
agccctttatcggcgtcggcgcgccccgcagccgcggcaaatccgggcctcaccagggtcccaggccgttcccacatcaggaaaggtctgggtctaatgaycctcgagtcaagaacaaccctgacggctgccctccctcttattcggcccaaggacttgaagcccggcatcttccgacctgccctgcccccacccctgcct

SEQ ID NO: 557906 - DNA, 201 bp, Homo sapiens
gcttcctctgccactctcaggtgagcgtgcgccccggggtgtgcgtgtgagtgtgagtgttggtgtgtggtgatgctggcggtggggtctatgggccacamcttcaacccgcctgggctgtttccaccccgtgcacagtatcgcctggtcggcttgggcctgacgcctcttctcccacagttcctgcgctcccaggcaccc

SEQ ID NO: 557907 - DNA, 201 bp, Homo sapiens
gcagcggcccaggcgggcgggatccaggcgggccatggcggatgtccccggggcacagcgagcggttcctggtgacggcccagagccccgggaccccctgkactgttgggcctgcgctgttcttgtaacagcccagaatctgctggtggctgccttcaatcttctcctgctggtgctggtgctagggaccatcttgctacc

SEQ ID NO: 557908 - DNA, 201 bp, Homo sapiens
cttctcccacagttcctgcgctcccaggcacccccttgcaccgcgcacctgcgggaccccggtttcacggccctactggtcaccggattcctgctcctcgkgccgctgctcgtgcttgctctggccagctaccgccgcctctgcctgcgcctccgcctagccgattgcctcgtgccctacagccgagccctttatcggcgt

SEQ ID NO: 557909 - DNA, 201 bp, Homo sapiens
ggttcctggtgacggcccagagccccgggaccccctggactgttgggcctgcgctgttcttgtaacagcccagaatctgctggtggctgccttcaatcttytcctgctggtgctggtgctagggaccatcttgctacccgctgtcaccatgctgggcttcggcttcctctgccactctcaggtgagcgtgcgccccggggt

SEQ ID NO: 557910 - DNA, 201 bp, Homo sapiens
tgtgtggtgatgctggcggtggggtctatgggccacaacttcaacccgcctgggctgtttccaccccgtgcacagtatcgcctggtcggcttgggcctgaygcctcttctcccacagttcctgcgctcccaggcacccccttgcaccgcgcacctgcgggaccccggtttcacggccctactggtcaccggattcctgctc

SEQ ID NO: 557911 - DNA, 201 bp, Homo sapiens
ttccagaccaaatttgcactcagcctctctccaggtaagctcaaccctgctctggcaagagaatgagggaatgtgtaggtggggcctctggattgtcagcyttccctccccaaggactgtggatgcagtaccaaagaactgctgaagatctctgcacacctgagcatgtgtgcatgtgtgtgcctttttgtgtgagtgaat

SEQ ID NO: 557912 - DNA, 201 bp, Homo sapiens
tgctagtgagctcatcgaaaagaggttggctagaaggccacggggtgggtgcgtggatgcatgaagccctgccctggggtccagatactgggcatctcctsctagctgtgcactgtccagcctgggcacagtgggcccttcctgaagctattcccaggggatatgctgaactaagttgccacaggacctgcagcctgccca

SEQ ID NO: 557913 - DNA, 201 bp, Homo sapiens
ggctgcaggaggtcccggcgcggggtctgcggccccggtctcctccacatcctcccttcccctggctgctctcaacatgcgagtgcggcgccgcctgtctstgttcttgaacgtgcggacacaggtggcggccgactggaccgcgctggcggaggagatggactttgagtacttggagatccggcaactggagacacaagc

SEQ ID NO: 557914 - DNA, 201 bp, Homo sapiens
ggagacacaagcggaccccactggcaggctgctggacgcctggcagggacgccctggcgcctctgtaggccgactgctcgagctgcttaccaagctgggcygcgacgacgtgctgctggagctgggacccagcattggtgaggacgtccccttcctggcctcgtacctggggggtgaggaggctgactttccgcggcctca

SEQ ID NO: 557915 - DNA, 201 bp, Homo sapiens
tcaagggtagaggtgggcacccccgcctccgcacttttgctcggggctccagattgtagggcagggcggcgcttctcggaaagcgaaagccggcggggcgsggcgggtgccgcaggagaaagaggaagcgctggcagacaatgcgacccgaccgcgctgaggctccaggaccgcccgccatggctgcaggaggtcccggcg

SEQ ID NO: 557916 - DNA, 201 bp, Homo sapiens
ggaagagagctgcttaaactcacacaacaatgaactgcagacacagctgttctctccctctctccttcccagagcaatttatactttaccctcaggctgtmctctggggagaaggtgccatggtcttaggtgtctgtgccccaggacagaccctaggaccctaaatccaatagaaaatgcatatctttgctccactttcag

SEQ ID NO: 557917 - DNA, 201 bp, Homo sapiens
gacacaggtggcggccgactggaccgcgctggcggaggagatggactttgagtacttggagatccggcaactggagacacaagcggaccccactggcaggmtgctggacgcctggcagggacgccctggcgcctctgtaggccgactgctcgagctgcttaccaagctgggccgcgacgacgtgctgctggagctgggacc

SEQ ID NO: 557918 - DNA, 201 bp, Homo sapiens
cttgggagggaatggatgcccctctctgcatgatcttgttgaggcatttagctgccatgcacctgtccccctttaatactgggcattttaaagccatctcragaggcatcttctacatgttttgtacgcattaaaataatttcaaagatatctgagaaaagccgatatttgccattcttcctatatcctggaatatatctt

SEQ ID NO: 557919 - DNA, 201 bp, Homo sapiens
tggaaaggacccaatgtaccagtatttatacctctaatgaagcacagagagaggaagagagctgcttaaactcacacaacaatgaactgcagacacagctrttctctccctctctccttcccagagcaatttatactttaccctcaggctgtcctctggggagaaggtgccatggtcttaggtgtctgtgccccaggacag

SEQ ID NO: 557920 - DNA, 201 bp, Homo sapiens
catcctcccttcccctggctgctctcaacatgcgagtgcggcgccgcctgtctctgttcttgaacgtgcggacacaggtggcggccgactggaccgcgctkgcggaggagatggactttgagtacttggagatccggcaactggagacacaagcggaccccactggcaggctgctggacgcctggcagggacgccctggcg

SEQ ID NO: 557921 - DNA, 201 bp, Homo sapiens
atggctgcaggaggtcccggcgcggggtctgcggccccggtctcctccacatcctcccttcccctggctgctctcaacatgcgagtgcggcgccgcctgtmtctgttcttgaacgtgcggacacaggtggcggccgactggaccgcgctggcggaggagatggactttgagtacttggagatccggcaactggagacacaa

SEQ ID NO: 557922 - DNA, 201 bp, Homo sapiens
gaacaaaaattgggcactcatctattccttttctcttgtgtccctactcattgaaaccaaactctggaaaggacccaatgtaccagtatttatacctctartgaagcacagagagaggaagagagctgcttaaactcacacaacaatgaactgcagacacagctgttctctccctctctccttcccagagcaatttatact

SEQ ID NO: 557923 - DNA, 201 bp, Homo sapiens
acaaacagcgaccatataaaagcctcctgccccaaagcttgtgggcacatgggcacatacagactcacatacagacacacacatatatgtacagacatgtrctctcacacacacaggcaccagcatacacacgtttttctaggtacagctcccaggaacagctaggtgggaaagtcccatcactgagggagcctaaccatg

SEQ ID NO: 557924 - DNA, 201 bp, Homo sapiens
cctggtcttgtcctcaggcccctcatgtgtcccattggtgcccccttctcctgccctggccctgatacttgccccgattcttgctccagagccacccgtcycacaaggaagtggtggatggcagcccggcagcagcatcaaccatctctgagataacagcagtgagtcctggggcccctagccttccccacagtggcctgg

SEQ ID NO: 557925 - DNA, 201 bp, Homo sapiens
agcaagctaaatcgctatttgcagagcctgtggctgtttgcagagcctgtgtttatacagagttcagctctgtttcaagaatttgtcagctgaagcgggargatcacttgaacccagaaggtggaggttgcagtgaagtgtgttcgaatcatgcactgcaggctagggtggcagagcaagaccctgtctcgaaaaaactgg

SEQ ID NO: 557926 - DNA, 201 bp, Homo sapiens
gacaggaagtcaacaacttgcggctatccagatggccgggcaatggcagggcaggtgccgtggccctgcaggccctcaagggctcccaggacagctcagakaatgatctggtgcgaagccccaagtcggctggcagcagaaccagcagctccgtcagcagcaccagcgccacgatcaacgggggcctgcgccgggaacaac

SEQ ID NO: 557927 - DNA, 201 bp, Homo sapiens
caggtgccaagcacaaagtcagggacaggatccctcctggtaggcagtggacaggcaggcagagacagggcctgagccaggggtcctggctgcccggtaaktgccactgttaggtggcctgtagtcaagtcagccacttttgtgaaagacagggctctggctgctctggtctggaggtcggctccccagggacaactgtca

SEQ ID NO: 557928 - DNA, 201 bp, Homo sapiens
gctctgaggcaatatgtcccacactgggacaggaaggcgcccctgggagcccttgcccagcctgaggccttgctctcctataggagagagctgggcaccayggaaaggggcagtcagcatccaccacaaggcttttccaagtgcaaggcactgacagccacaacaccaggaccatggaggtgccagcccgtgcctcatccc

SEQ ID NO: 557929 - DNA, 201 bp, Homo sapiens
tggacaggaagtcaacaacttgcggctatccagatggccgggcaatggcagggcaggtgccgtggccctgcaggccctcaagggctcccaggacagctcakagaatgatctggtgcgaagccccaagtcggctggcagcagaaccagcagctccgtcagcagcaccagcgccacgatcaacgggggcctgcgccgggaaca

SEQ ID NO: 557930 - DNA, 201 bp, Homo sapiens
cagactctgacttccaagatatctttgggaaatccaaggaggaattctacagcatggccacgtggaggcagcggcaggagaaaaagcagctgggcttcttytgaacccaagccctctcgactgcccctatcccctggaccccaacatacctacaatgctggggaggccctgcttccactcccctcagaggcttttggtcat

SEQ ID NO: 557931 - DNA, 201 bp, Homo sapiens
caatatacaggtgggaaaggcccgaagcttagaacaatgtcactgccaacacagggcctacctgggatttgaccagagtccgcctggctccaggctctgcmacccacaggaagaagaaactacactgacagatgtgagacagtgtttccccttcagtctttgaacaggctttgtgttttctaaatgacactggataaaagg

SEQ ID NO: 557932 - DNA, 201 bp, Homo sapiens
gctttctccatgagcagagagggaccctgtacccagagcagagcggagtgctcggggagaaaccacggggctcagaggagggcccagggctcccactcctragaagtggcttcccaggccctggggtggggcacttgtgccatgggctggggtgcccctctgggtggctcacagccttgctgtccgtgctggccaggctcc

SEQ ID NO: 557933 - DNA, 201 bp, Homo sapiens
atcagcctctgggagctgagcagtgacaggagaagtctctgctgtgagagggcacactggtgacaccctgactcccaggtcctctcccgcaggggctggcyttgacctacagcctccgggacagggaacgtggtggtggtcgtgcacagattggtgtggtggatgatgaggccaaagccccggacctcatgcagatcatgg

SEQ ID NO: 557934 - DNA, 201 bp, Homo sapiens
gttggtgtccccctggatgccaggatgaggggacatcagcccttctccccatcagcctctgggagctgagcagtgacaggagaagtctctgctgtgagagsgcacactggtgacaccctgactcccaggtcctctcccgcaggggctggctttgacctacagcctccgggacagggaacgtggtggtggtcgtgcacagat

SEQ ID NO: 557935 - DNA, 201 bp, Homo sapiens
aggtaagaggcctgtgggttcagtgcagcctccctgtgggctactgattccccatcttccccagcctgaggctcctctctggacaggaagtcaacaacttscggctatccagatggccgggcaatggcagggcaggtgccgtggccctgcaggccctcaagggctcccaggacagctcagagaatgatctggtgcgaagcc

SEQ ID NO: 557936 - DNA, 201 bp, Homo sapiens
tgcccgcagggaggtgggcaccccctcactgccccagcactagtgcatctgacactgagctggaggagcccaaggcaggatccactggtggcgggcagtgkgcaactgccccgggagatgtgtcttctagctggggtggtgggcaaacagatgcgggagtcccaagccctggatgactgacactactgagtggggcaggat

SEQ ID NO: 557937 - DNA, 201 bp, Homo sapiens
ttgaacccagaaggtggaggttgcagtgaagtgtgttcgaatcatgcactgcaggctagggtggcagagcaagaccctgtctcgaaaaaactggaaaaaaraattgtcaagtgtttatgcctaatctgcccaacccactcatatcagctgagcctgtcacttgctgcagaatctgagtcttcatagtctgtgtgctgacat

SEQ ID NO: 557938 - DNA, 201 bp, Homo sapiens
gtgtctatgagaagggcaaagacctggtggtcctggagttggcgacccccccactgacccaggacctgctgcaggaggaggtgaggaaggcctggccccarctacttgcatccttccccatccacaaccccagcccagtctggaccacctactgaccagccccacccttgctcccaggacttctacatcctggaccagggt

SEQ ID NO: 557939 - DNA, 201 bp, Homo sapiens
ctggggtggggcacttgtgccatgggctggggtgcccctctgggtggctcacagccttgctgtccgtgctggccaggctccctgaggaggtccccagcttscagccacgactgtttgagtgctccagccacatgggctgcctggtcctcgcagaagtggggttcttcagccaggaggacctggacaagtatgacatcatgt

SEQ ID NO: 557940 - DNA, 201 bp, Homo sapiens
tctcagactctgacttccaagatatctttgggaaatccaaggaggaattctacagcatggccacgtggaggcagcggcaggagaaaaagcagctgggcttyttctgaacccaagccctctcgactgcccctatcccctggaccccaacatacctacaatgctggggaggccctgcttccactcccctcagaggcttttggt

SEQ ID NO: 557941 - DNA, 201 bp, Homo sapiens
aggcctgtagggtgaggaagatgccttgttcactggtgtcctgctgtcagcttaggcctcctgtgacttgggcccagccccaccccatacaccctgtgaaygggacgtggggccggaggtgaaggcccctcctcatgcagggcctgagccatctctttgcctgctagggctgtaatggtgatcagcgtgagatggcacggg

SEQ ID NO: 557942 - DNA, 201 bp, Homo sapiens
tgggctggttcaggaagagcagccacctgtgcccattggtcccttattccccaggtgtggtgcatccaggacttacacaggcagcccgtggaccccaagcrtcatggacagctgtgtgcaggcaactgctaccttgtgctctacacataccagaggctgggccgtgtccagtacatcctgtacctatggcaggtgtgccag

SEQ ID NO: 557943 - DNA, 201 bp, Homo sapiens
aatatacaggtgggaaaggcccgaagcttagaacaatgtcactgccaacacagggcctacctgggatttgaccagagtccgcctggctccaggctctgccmcccacaggaagaagaaactacactgacagatgtgagacagtgtttccccttcagtctttgaacaggctttgtgttttctaaatgacactggataaaaggg

SEQ ID NO: 557944 - DNA, 201 bp, Homo sapiens
gtctgctacctctggtttgggaaggtacccacagcactgaccacttgattcatgcccagatgtagtggtgccaggctgggggtgggtcctctccacagggsatgcagactttgagtccagcctcagataggccgatggggggaatggggaggggaagaagccacagggtcccctctagaacttggggaaagttacaaagtg

SEQ ID NO: 557945 - DNA, 201 bp, Homo sapiens
cctatgccagtttgctggagttttctctaatattcagcataaactatgactgaccctctaagcctgggggcctcctatcccatgctctggaccctgcgagrgtcccagaccctgcgatccagatcaactggggacacaggcctgtagggtgaggaagatgccttgttcactggtgtcctgctgtcagcttaggcctcctgt

SEQ ID NO: 557946 - DNA, 201 bp, Homo sapiens
agtgcaaaggtctgcagacaacgacctgggcgtcttcaagggacacaaggaatcatattgccagaacacagtaagccatggggagagtgatgggagaggcmgccgggaacggccattgagagtttcatcccagttttagtggaagccactggaaggtttggggaggggggtgatgtgagcgggtttatggttaaattctga

SEQ ID NO: 557947 - DNA, 201 bp, Homo sapiens
tgcagggcaggagctaggattgagttacagtggtggggaccaggagtagggaggcagagactggccccgtgccaggcctagcactgcccacaggcagggcraaggcgcgggagcagtttccagcaggtaggcctgggcagagagttggggggcgggggtttccagggaaccagtggggcagagtgggctattcaagtcaag

SEQ ID NO: 557948 - DNA, 201 bp, Homo sapiens
cccgcaacacatatacacaaacacccggaccctaggtcccccagagcccgaaggccacgcagggggcgtccagcgacctgcactactgggtcgggaagcargcgggtgcggaagcgcagggcgctgcggaggccttccagcagcgcctacaggacgagctggggggccagaccgtgctgcaccgcgaggcgcagggccacg

SEQ ID NO: 557949 - DNA, 201 bp, Homo sapiens
tgaggtgagaggcacgaccaaataggagagttggtgacatggaagagcgtggggttttccacactaggcttctcccgcccccaactcagagcgtcctcttycaccccaccccagcgggtgtcatgggtagaggcctcctgagttgttacagggaactctcctctcccagaaccggaagatggtgccggtacccgagggggc

SEQ ID NO: 557950 - DNA, 201 bp, Homo sapiens
gaatcacatcccacaagggggcggttaccgttgaggcttcttagtccttccctcccacttcctgatctccgcggaagcccctgcctagcgtctccccatgrcccttggtacatcctccccttctccacccgcacctccgtcttccccgcaacacatatacacaaacacccggaccctaggtcccccagagcccgaaggcca

SEQ ID NO: 557951 - DNA, 201 bp, Homo sapiens
tccagcctgagaactctggctgttgttccttgtgtcgtcccatattcctgcctggcctgcgatggacatcagcaagggcctcccaggcatgcagggaggcytccacatatggatctctgaggtgagaggcacgaccaaataggagagttggtgacatggaagagcgtggggttttccacactaggcttctcccgcccccaa

SEQ ID NO: 557952 - DNA, 201 bp, Homo sapiens
ggtgagcgggcggggcggggctgacgggggcggggcgggactggcgggggcggggcctggcaggaatcggcaactcgttgggatgggtgagcgggcggggyggggccggagggggcggggcctggtctgcacggggcggaacagagcctcaggatgaggaaaggggcgtgggctgcggaggacgcggcgggacctggaatc

SEQ ID NO: 557953 - DNA, 201 bp, Homo sapiens
tcagctgagcctgtcacttgctgcagaatctgagtcttcatagtctgtgtgctgacatttgtgtgtttacagagccctcctaataaaagtcatgttctatratgaagttgtacaggtagccaggtgtcggtctccagcctgagaactctggctgttgttccttgtgtcgtcccatattcctgcctggcctgcgatggacat

SEQ ID NO: 557954 - DNA, 201 bp, Homo sapiens
agtccgtggcccacaaattcagtgtgcctgcccccaaccctggccccatcctcctttcccctcactctagagggcggcaccactccctgctccatggaaamtgagcaaggtaatctcgggctcccttcaaaggtacccacaaaagaaggaagggctcctgtagggagagaaagaggcactggaggagggagaaagcgagga

SEQ ID NO: 557955 - DNA, 201 bp, Homo sapiens
tacccgagggggcttacgggaacttttttgaggaacactgctatgtcatcctccacgtgagtcgcttggggaagtctgcctgagaggggtggcatggcccrgcactggggagactgaggcacaggcataaactctgccctgggaagcggcaagttgagagccggagaatcacatcccacaagggggcggttaccgttgagg

SEQ ID NO: 557956 - DNA, 201 bp, Homo sapiens
ctgggctcagatgacaccctaccctgtacctccccctctctcccctgcccagttctatctctcagactctgacttccaagatatctttgggaaatccaagraggaattctacagcatggccacgtggaggcagcggcaggagaaaaagcagctgggcttcttctgaacccaagccctctcgactgcccctatcccctggac

SEQ ID NO: 557957 - DNA, 201 bp, Homo sapiens
gggagaggaacctgacctgggccaatggaatgaggaggcactgccctggctggggattgccagtgtgtgcgagagacctggtcttgtcctcaggcccctcmtgtgtcccattggtgcccccttctcctgccctggccctgatacttgccccgattcttgctccagagccacccgtcccacaaggaagtggtggatggcagc

SEQ ID NO: 557958 - DNA, 201 bp, Homo sapiens
agacctggtcttgtcctcaggcccctcatgtgtcccattggtgcccccttctcctgccctggccctgatacttgccccgattcttgctccagagccacccrtcccacaaggaagtggtggatggcagcccggcagcagcatcaaccatctctgagataacagcagtgagtcctggggcccctagccttccccacagtggcc

SEQ ID NO: 557959 - DNA, 201 bp, Homo sapiens
ctgcaaggtgtacgctggctgtggctgtactgagtccagtctgtccccctccaggttcggcacccaggtctccggaggagacacagttacccgaacccttygcctgaataactccagcccctgtggtaagacatgcatgagagaagtcagtgttcttgccacaggctgtgccttgtggtgagccaggctgggagggaaggt

SEQ ID NO: 557960 - DNA, 201 bp, Homo sapiens
tatagctgggcactctgaaacctagaagttatgacagtgtgcatcaaattgccaacgccattgccaagtacctgttacacaggcttggagttcaatacttyccctcccagggctcatccatctcccaccatggatcctgaaaccacaaaagactaaggctggcgcttgggctgggatggggctgggggcagggtggcatca

SEQ ID NO: 557961 - DNA, 201 bp, Homo sapiens
acccccttgttaggcacctctgccccatcctgcttctccccacattccagtcccctgcacttctagggatttcctgggattttccagagcacagttagaakcttacagacctcagccagcctcctcatttgatagaggagagactggaaggggcagggcttccccaaggtcatacggctgatgggtagcggcatcacatct

SEQ ID NO: 557962 - DNA, 201 bp, Homo sapiens
acatagcccatgactggcccaggtagctgttggagcccagttgtggtgctgctcctgcccgtggctgactggggagctctgagtgtcatgggacataaggmcacatccatgtgcaccagaagcatctgccctctgctccccatccctcggggccttcaagggcagtttcttttgtccagataacctcccaacaagtggtaa

SEQ ID NO: 557963 - DNA, 201 bp, Homo sapiens
ggccgcagccactgctccctcctgggtagcatgctgcctactcagcccagggatcagctgtgatcagacttgggctcagtaggtggaaagggagattccasggaagaggcatcgcctgcaggactttgcggtgggacccctgaaactggacctgcatagctacgtgaggcctgcacagtgagtcagctggggtgccccatc

SEQ ID NO: 557964 - DNA, 201 bp, Homo sapiens
cggaagatacaaggtctgaataaaagaaggagaaaaatgggtattaaaggactaagaattgggaggacctaggatatttaattagagagtgcctaaggggkttcagcgcaattacttgcttggtttagaagtgatctccttgaggatagatttccatgatggaaaggaaatgagaggttctaagagacgggctagcggctt

SEQ ID NO: 557965 - DNA, 201 bp, Homo sapiens
tgagttggggtatgggctgggagctgtctgcattggccggccagtgggcatgggacagtgctaaggctgctgtgtctatgccaggtggtccctgctggggkcagcagtaccatctacatctccttcacccctatggtgctcagccctgagatcctgcacaaggtggagtgtactggctacgccctgggtttcatgagcttg

SEQ ID NO: 557966 - DNA, 201 bp, Homo sapiens
ttgccaggtgggtgcaaagggagatacgaggatgctggcaagacagaggtggacatggcggcccccaaagactagtctgcctggggaaggacgtgaaagckgacataggctgatggatagatggggagaaggaagggcatgtgggggttagagagcccagcctgcccacaaacaggccggaaggagaagcagctgtgggag

SEQ ID NO: 557967 - DNA, 201 bp, Homo sapiens
tgttggcaggttctgcattatgcccaaaacaagctggccaccactaagtttcaaggtgagtgatcacaggttgctaactggaaaaattacaagtccatcaraggaaataacccccagaggaacttactagagtatacctatgattggaaacacacagaacgcagagtgttgtaaactctctatgcaactgccacaacccga

SEQ ID NO: 557968 - DNA, 201 bp, Homo sapiens
gtccattctgggagcccagtaagtgacaacaggctcactcatgtgtctgccagctcctcggacaccaagcagaattctgcatggtgacagtctcccccaawcatggcctgctgggcccaagtgaggagtgccagctcaagttggagttgactgctcatacccaggtgagtaaggcaatgtagggcctgagtgaccgggaag

SEQ ID NO: 557969 - DNA, 201 bp, Homo sapiens
caccgataggagaattccagagtacagagccagaacagaggtatgtctttctctggcttgaactctcagaaaacctggcccatgagagttaacctagatgrtcctccgtttggtctggctgtagaggtccctagacttgtggggcagggtagcagtatcagaacagagcagggctgcagggtcacccactggtgtggcctt

SEQ ID NO: 557970 - DNA, 201 bp, Homo sapiens
gtccagcagccccagccagcccacctggaagtcctccttgtattcctccctcgcctactctgaggccttccactacagcttcgcagcccggccccgccgcytcacgcagcttgcgctggcgcagcgtcccgagcctcagcggcttcgtctgcgcccctcctcgctgcgcacccaagatatctcgcacttgctcaccggcgt

SEQ ID NO: 557971 - DNA, 201 bp, Homo sapiens
cctggaagtcctccttgtattcctccctcgcctactctgaggccttccactacagcttcgcagcccggccccgccgcctcacgcagcttgcgctggcgcakcgtcccgagcctcagcggcttcgtctgcgcccctcctcgctgcgcacccaagatatctcgcacttgctcaccggcgtcttccgcaacttgtactctgccg

SEQ ID NO: 557972 - DNA, 201 bp, Homo sapiens
aagtctgatgagatctgatggttttataaagggcaattctcctgcacacactctcttgccttcgctcatgtaagacatgcctttgctcctccttcaccttstaccatgattgtgaggcctccccagccatgtggaactgtgagtccattaaacctctttttctttataaattacacagtctcgggtatttattcatagcag

SEQ ID NO: 557973 - DNA, 201 bp, Homo sapiens
cttctatgaagtgaagagtgtctccagatggtgtatagacagcgagttgctacggaaacatcatttgatctccccagaagattactacaccgatacagtgscgtttcactctgcacctaaaggtaatgcttctgtgctctcaaggcctctgataccatttgggggaagttcagtagggccacgttggccacctctgctgcc

SEQ ID NO: 557974 - DNA, 201 bp, Homo sapiens
tggttgcctgatgttccctgaatcctgggagtcagctactgtcccttttttgttgttgttggctagagattaggggagattaaataattaactatttgggtttttttttttaatgaaagtgaaataaaacattgagaaccaggagacaaatgtcagtttggagaatttttcaatgactttcattttatttttacccaagaa

SEQ ID NO: 557975 - DNA, 201 bp, Homo sapiens
agcccttggtgagttttggaaaggaaggccatttatttcaaaaagcagtagtaggcagatgattgagtggctgtgagtttgaaaacaacttccagataacttttttttttttcaagacagggtctcgcttcatcacccaggctggagtgcagtggtgcaatcttagctcactgcaacccctgactcctgggctcaagtaat

SEQ ID NO: 557976 - DNA, 201 bp, Homo sapiens
acatttagctgtgagaagcgttccgtccagaagaaagagctgaacaagaagcttgaagattcatgcaggaagaagcttgctgagttcgaagatgagttagmccacactgtggacagcctgacatggaatttaactcctaaggccaaagaaaggaccagagaacctctcaaggtcagtttggaaggctgtgcagagcagtgt

SEQ ID NO: 557977 - DNA, 201 bp, Homo sapiens
aatcccagcacttcgggagaccgagttgggtggatcacttgagcccaggagtttgagaccagcctgggcaaaatggtgaaatctgatctctacaaaaaatacacacacacacacacacacacacacacacacacacacacacaaatagctgagtgtggtggcatgcgcctcccagctacttgggaggctgagatgggagga

SEQ ID NO: 557978 - DNA, 201 bp, Homo sapiens
catttagctgtgagaagcgttccgtccagaagaaagagctgaacaagaagcttgaagattcatgcaggaagaagcttgctgagttcgaagatgagttagamcacactgtggacagcctgacatggaatttaactcctaaggccaaagaaaggaccagagaacctctcaaggtcagtttggaaggctgtgcagagcagtgtt

SEQ ID NO: 557979 - DNA, 201 bp, Homo sapiens
atcccagcacttcgggagaccgagttgggtggatcacttgagcccaggagtttgagaccagcctgggcaaaatggtgaaatctgatctctacaaaaaatacacacacacacacacacacacacacacacacacacacacacaaatagctgagtgtggtggcatgcgcctcccagctacttgggaggctgagatgggaggat

SEQ ID NO: 557980 - DNA, 201 bp, Homo sapiens
gccatctatgggtcatgcagttggtcaagatgtcaacaagcacaatccctttgcctgtcattgactctatgcttttgtatgtttcaaagaaagcaagtcawccaaggaataaaaactggatgaaccacttacgtgtgccacagagagagctagacagacttctgcttgccagaatggagagtcggaaccacttcctaaaaa

SEQ ID NO: 557981 - DNA, 201 bp, Homo sapiens
catcggcatcatggcccgttctccatgagctattgggtacacctcccagacggggtggcggccgggcagaggggctcctcacttcccggacggggcggccrggcagaggctcccccaccacctcccgggaagggcggctagccgggcgggggctgccccccacctcccggacggggtggctgcggggcagagacactcctc

SEQ ID NO: 557982 - DNA, 201 bp, Homo sapiens
ccgggcagaggggctcctcacatcccagacgatgggcggccaggcagagacgctcctcacttcctagatggggtggccggccgggcagaggctgcaaactragcactttgggaggccaaggcaggcggctgggaggtggaggttgtagcgagccgagatcatgccactgcactccagcctgggcaacattgagcactgagt

SEQ ID NO: 557983 - DNA, 201 bp, Homo sapiens
taggctaaggggaggaagaattcctgccatgccccagccttctccaggacaacctgctggaacgcagtggtgttttcagggcactgtgtttgccttgcagmtgagggattttcacagtgtgctccagatggtgctagaggaagtcccagagcctgtaaggtgagagaaactgggccctggatgagaagtgggcagctgggc

SEQ ID NO: 557984 - DNA, 201 bp, Homo sapiens
ccagccttctccaggacaacctgctggaacgcagtggtgttttcagggcactgtgtttgccttgcagctgagggattttcacagtgtgctccagatggtgmtagaggaagtcccagagcctgtaaggtgagagaaactgggccctggatgagaagtgggcagctgggccttcccccaccttgggggttctcctggggaagg

SEQ ID NO: 557985 - DNA, 201 bp, Homo sapiens
cttgtaagttgcacagcactacatcctctgcatgccgtagattacaaacaagtcactaaggttcatccagattcaagggaagatatgtagacttcatttctttttttttaaaacctttttttttgaaataaggtctggctctgtcgcccaggctggagtgcagtggcatgatcttggctcactgcaacctctgcctcctgg

SEQ ID NO: 557986 - DNA, 201 bp, Homo sapiens
cctgggctcaagcaactcctcccaactcagcttcccaagaagctggggctacaggtgcaggccaccacacctggctaatttttgtattttttgtatagacrggtttttgctatgttgcccaggctggtttcaaactcctgagctcaagcaacccacccgcctcggcttcctaaagtgctaggattacaggcgtgagccagt

SEQ ID NO: 557987 - DNA, 201 bp, Homo sapiens
caccagctgggtggactttgggacctgctttgtgagccagcagcgagtccgggaggtctacctgatgaacctgagcgggtgccgaagctactggactatgytgatgggtatgtcctaccctgccacctacccaccgttcccctacagggctgtgccaagagaagaccccccaggaaggggcccctgtgcgccgtccctgca

SEQ ID NO: 557988 - DNA, 201 bp, Homo sapiens
aggcattcagatgacatgagaagctgtgatgaatccatcgcaaaatagagtagagcttgtgttggccatctatgggtcatgcagttggtcaagatgtcaamaagcacaatccctttgcctgtcattgactctatgcttttgtatgtttcaaagaaagcaagtcaaccaaggaataaaaactggatgaaccacttacgtgtg

SEQ ID NO: 557989 - DNA, 201 bp, Homo sapiens
ataaactagctttcatcttaaaaaaaaagtgaaaacaaaatccacaaaagcaaatataacgaacagattcagtatccaaaatatgtaaagaattaggagtyaacaagaaggtggcaaacagctcacttaggaaagagcaaaaaccatgactgggaatttgcagaaatggaaaaataaataaaaatgctcattcttagtgat

SEQ ID NO: 557990 - DNA, 201 bp, Homo sapiens
aacctgctggaacgcagtggtgttttcagggcactgtgtttgccttgcagctgagggattttcacagtgtgctccagatggtgctagaggaagtcccagarcctgtaaggtgagagaaactgggccctggatgagaagtgggcagctgggccttcccccaccttgggggttctcctggggaaggtatcaggtgagggggag

SEQ ID NO: 557991 - DNA, 201 bp, Homo sapiens
gagcacttcataggtgatgctgtgtgtttccctcaggaggtacatgatatgtggttgctatctctcctttcatgatgctggcagcctttttattttattawtttattaggggttacaaattataatgaaatgctaatggtaataataattctatctttatttatttgtcagctgaactacttctataaagacaaacttttc

SEQ ID NO: 557992 - DNA, 201 bp, Homo sapiens
atcagaatgttaataatgttcttagggggcaattaactacctataatcaaaattgggttgtttttcctatggacttgtccatagtctggattttactgatmtcagcatcatggtgtcatttaacctgttcttccttgtatttcctataaatctgtaattagttctagagactttatgaggtttaggttcaatgatggtcag

SEQ ID NO: 557993 - DNA, 201 bp, Homo sapiens
tatcagaatgttaataatgttcttagggggcaattaactacctataatcaaaattgggttgtttttcctatggacttgtccatagtctggattttactgawatcagcatcatggtgtcatttaacctgttcttccttgtatttcctataaatctgtaattagttctagagactttatgaggtttaggttcaatgatggtca

SEQ ID NO: 557994 - DNA, 201 bp, Homo sapiens
ccattcccctctatgggtctcagttttcagatctagtagttcagaccagatggttggaatagttctctgactattctatgcttcactggaagccctgatcytggggtagggctgagtaaagctaagtaatggtaagtaatctcaccatatttctgtgcatttgatcatccccctgccagattcgggagctctataagcagc

SEQ ID NO: 557995 - DNA, 201 bp, Homo sapiens
agaatgatattaagttctaatcagccattatctgtcctggtttctcaggtctctgctggtgatgtgtctttcttttaagaagtgaagaagtagacacactratccagttccatggatacccctctggtgtgtctgcttctcagagaagggtgaggtaacttttttttataactcagataactggcaatgaggacattcccc

SEQ ID NO: 557996 - DNA, 201 bp, Homo sapiens
tcctgccctgctaaagacagtgcggatgcaagagcacctggccaagcgagagcagctgggtaagcgccaccagggtggggcttcggggcccaggccacggmcagagccacagccttctgtggatgtgggctggcagctgccagggagcgggaccaggaccagagactgctctcagatggccaaggcgctccacctgacaat

SEQ ID NO: 557997 - DNA, 201 bp, Homo sapiens
accttcggtccacggctaggaagcagctgattattagaaatgctacgtgggtaacccctgtgtgtgccccaatacccaacccttcttcttgcttacctggscctcagtcccagtgagacaggaggtccttccaagggcctggggaagactgggcacagaatggatatccaaattcaattgagggatccagattgacccagt

SEQ ID NO: 557998 - DNA, 201 bp, Homo sapiens
tattcctccctcgcctactctgaggccttccactacagcttcgcagcccggccccgccgcctcacgcagcttgcgctggcgcagcgtcccgagcctcagckgcttcgtctgcgcccctcctcgctgcgcacccaagatatctcgcacttgctcaccggcgtcttccgcaacttgtactctgccgaggtcatcggcgacgaa

SEQ ID NO: 557999 - DNA, 201 bp, Homo sapiens
gacaactgccagataaaggagctggtgaccataggtgggcttgagtgtactcccaggggcaaggctggagaggctgccccagctccaggggccactgaccrcagtagcattagcggcagcccacctgtttcctgtgtgtgtcaggagcgcacattaagaatgctgcagcctccaggtgccagagtctcgtttcaggcccat

SEQ ID NO: 558000 - DNA, 201 bp, Homo sapiens
ccacagtgtcaagccatgattgttctgcttgcttttgggttttctcagtggaggttgactcacagcaggggatgaggccaacagtccagctaaccccaccrtaggttttgctggcttatgaacatccctgaggggacctgtgccacagtgggcaaggaagaagtgcctgtgcaccctgaggagtcctaacaggtcgtcgtt

SEQ ID NO: 558001 - DNA, 201 bp, Homo sapiens
aaccacagtgagctcccacctgacacccgttagaatggctattatcagaaagatgaaaggtaagtgttggcgaggatgtagagaaaagggaatccttgccygctgttgatgggaatgtaaattactacagccgttatggaaaataatatggagttccttcaaaaaattaaaaatggaactaccatatgattcagcagtcct

SEQ ID NO: 558002 - DNA, 201 bp, Homo sapiens
tgaagctgctcagagggctacccccctagtttggctcaccagctctcctctggctccccagctctccccattttccctggagcacctccctccgccttctrtctctcagatctgggccagggcatggggccctctgacttatgtattcctttacttggagactcagtttctatgctcttaatcctgagactcttgtggctg

SEQ ID NO: 558003 - DNA, 201 bp, Homo sapiens
catgcagttggtcaagatgtcaacaagcacaatccctttgcctgtcattgactctatgcttttgtatgtttcaaagaaagcaagtcaaccaaggaataaawactggatgaaccacttacgtgtgccacagagagagctagacagacttctgcttgccagaatggagagtcggaaccacttcctaaaaaatccccgtttttt

SEQ ID NO: 558004 - DNA, 201 bp, Homo sapiens
ttcaggctggggctccaggcagcccagtgcagagatcccaggctggagggctgcagatggtccctggaggcagcagggcaatgccccgtcccagtccttaygctaaaccactgtcacagccatcggtgcttatcacctttcaggcactggctaatgcctttgatttagggggctcaggagctgtgggttaggcagtgtttt

SEQ ID NO: 558005 - DNA, 201 bp, Homo sapiens
cgtttttttcctcctaacactcgatatggaggcaagtctcttgtttttcctccaaagaagccagcaccgataggagaattccagagtacagagccagaacmgaggtatgtctttctctggcttgaactctcagaaaacctggcccatgagagttaacctagatggtcctccgtttggtctggctgtagaggtccctagact

SEQ ID NO: 558006 - DNA, 201 bp, Homo sapiens
ctcccagaatcctctgaaagttagggctatggaacctattcccgtccttggcagagtatgtcagccacaggcactgcagtgtggagggagggtgcttttgkgttgggaggcccatggctttgggtggccaggaattagccgggaagtgtcatatggactctttacgagcccacaatcctacagtccttcagcaggtacaga

SEQ ID NO: 558007 - DNA, 201 bp, Homo sapiens
aaagtggctccttacagggacaagtgtcctctctcagtcagggcaggaagaatggaatgtaaagagccctccccagatggggacacttttcttcctgctckttcccttcccctctccctttgtgtgtgtgcctggcatgggaggaggagcagaccgggggcggggtgggggtgggggcgggtaaatgaggctgagcctgca

SEQ ID NO: 558008 - DNA, 201 bp, Homo sapiens
ggggagtgggcagcctggtccccgcaggctttggggagtgagagcattttttttgccttgccctggcaacccagccctgcaatgggctgagcacactaagytcgctaaactcactatgaggccaccccaggaactttggagctgtgccccaggcccattgttgctcttggggagccaaactggggggccctcggtggtggt

SEQ ID NO: 558009 - DNA, 201 bp, Homo sapiens
acctggctggcaacatgtcttaagataatgttggctaatggagcaaacaacaaagtttgaaaacttccaacaagtcttctgttcgggcgctggtgacagcrgggactgatcgctcagcggcagtggcgcagaggcctcctccctggtccaccgcggtccccacccaaccccacctgtccctgctgcctgctgccgtagcag

SEQ ID NO: 558010 - DNA, 201 bp, Homo sapiens
aagtctgttactggccttactatggaaacctttaaaccattcccctctatgggtctcagttttcagatctagtagttcagaccagatggttggaatagttytctgactattctatgcttcactggaagccctgatcctggggtagggctgagtaaagctaagtaatggtaagtaatctcaccatatttctgtgcatttgat

SEQ ID NO: 558011 - DNA, 201 bp, Homo sapiens
actattctatgcttcactggaagccctgatcctggggtagggctgagtaaagctaagtaatggtaagtaatctcaccatatttctgtgcatttgatcatcyccctgccagattcgggagctctataagcagcggctggatgagtttgaaatgttggagagacatatcactcaggcccaagcacgggctattgcggaaaatg

SEQ ID NO: 558012 - DNA, 201 bp, Homo sapiens
aaagggaatccttgcccgctgttgatgggaatgtaaattactacagccgttatggaaaataatatggagttccttcaaaaaattaaaaatggaactaccawatgattcagcagtcctactactaggtatatatacaaatgaaatctggctggagtgcagtgatgtgatcattgctcactgcatcctctaactcctgggctc

SEQ ID NO: 558013 - DNA, 201 bp, Homo sapiens
tgtgtcttgttgagaagattcaaaggaggggctacaaagaagaaggtcatcaatatattgaataaggtgagaagcggaggggtggaaagaaagtaaatcaygagaaagagcttggctgaagtaatgagggctgtccctgaaaccttgcggcagcacagcccaggtaagctgctgggactgatgggtgacagggtcagtcca

SEQ ID NO: 558014 - DNA, 201 bp, Homo sapiens
aaggggttggggtttgagagattagtcgggcacgatcggcagggagagcacgtgtgtttttatgaagaattatgccgaggtaggtaatggatggagaagamatttgagttttggagggagatacctgatatcctttggagaataaatgttgaaggagcagaagtgtgtcttgttgagaagattcaaaggaggggctacaaa

SEQ ID NO: 558015 - DNA, 201 bp, Homo sapiens
tcagcacaaagacacagacttggggacctggggacctctgggcagctcctggaatggaagaacccccttccacaatggtctcagcctaggccctcatgatwtgtcctcagagctaacataaaggacaggccacaccacagcagagaccaccacattgagatcactactcagtgcatagcgaagaccagtatggcaaaatta

SEQ ID NO: 558016 - DNA, 201 bp, Homo sapiens
gagagctagctgcttgtctagccaccttatcagcataagcgttgcttagagcaatgggatctgacgccttttgatgcctcttgcagtgaatgaccttagcytcctttggaagtaaaggggccttgagtagagtttttattaaagaggcattaatgatggaggacccttgtgtagtgagggagcctctttcagcctatatga

SEQ ID NO: 558017 - DNA, 201 bp, Homo sapiens
gccagcaggagccagccaaggccgctgtggccttcagggtctccccaaacagtgggctgctagaagcacgatccgccaatgcacccccaacctccatcgcsttgcaggttttcttcactgccaggtgcagccccttccaaccttccccaaactgcccacagagcctggaccccctgcccaggtgcctcctaacctcagccc

SEQ ID NO: 558018 - DNA, 201 bp, Homo sapiens
gaggcatggggtggagggacctggtcccagcagaactgggacatggccttggatgcgttgcccccacaggcacgtggagctggccttctactggcagatcrtgaagcccaacctgcagcccctcatgcctggagaaaccttcagcatggacagcatcaagtgctaccccgacaaggagactgccttctccatcatgcccag

SEQ ID NO: 558019 - DNA, 201 bp, Homo sapiens
gaaggagaaaaactggccctgagggacagaagttggagagctagctgcttgtctagccaccttatcagcataagcgttgcttagagcaatgggatctgacrccttttgatgcctcttgcagtgaatgaccttagcttcctttggaagtaaaggggccttgagtagagtttttattaaagaggcattaatgatggaggaccc

SEQ ID NO: 558020 - DNA, 201 bp, Homo sapiens
atgggcctgtgaggctggaaggaggtattttccttggtctaagaactatttgccttgtgtgggaagagattgataggtggaaatttcagcggggaagtagstgggagtgaccgatgtgaaggagaaaaactggccctgagggacagaagttggagagctagctgcttgtctagccaccttatcagcataagcgttgcttag

SEQ ID NO: 558021 - DNA, 201 bp, Homo sapiens
ggcgagtgataacaggctttaatccttttaaagtgtgctgtgggatgggatattggcattgagtggggtaagggtgattaggttttaatgggatggtaatrggcatgtgatcagttgccagggaaggagtagagatgtcttatacttgtgggttaaggtggggggatacgagaggaagacacaaaggaggctttgggttgg

SEQ ID NO: 558022 - DNA, 201 bp, Homo sapiens
ccaaagttgtgaaagccgaggctggactgtactgccgccatctcggctcactgcaacctccctgcctgattctcctgcctcagcctgccgagtgcctgagmttgcaggggcgcgccgccacgcctgactggttttcgtatttttttggtggagacggggtttcgctgtgttggccgggctggtctccagctcctaaccgcg

SEQ ID NO: 558023 - DNA, 201 bp, Homo sapiens
catttaaatctctgtggatgctcttgaattatcctccaaaaagactgtgtcattttatacttctgcctacagtgtgtgagactagccattaccccacactytcaccatgacaaatgttgttggactttgtatacttgaccatctgacagttgttcaaatgtcccctcctgtgataacaaatacaggtctaggtatgagtct

SEQ ID NO: 558024 - DNA, 201 bp, Homo sapiens
agtgggggcaaatactgtggcagcccagtctttttcttaattttcaattttaatttttattatttgtacaaatttatggggtacatgtgcaattgtgttaygtgcgtagattatatagtggtcaagtcagggctttagggtatccatcacccaaatagcatacattgtactcatgaactaatttctcatcacccatttccc

SEQ ID NO: 558025 - DNA, 201 bp, Homo sapiens
ccagataacctcccaacaagtggtaaagtccatccagggttggggaggagaggagaagggacccgtggtttatccccagaagtgagcacccagccctgtcrgttttgctgtgggccccagtctgccagtctccagcattgcatgcagcagtgctgagcactctctggatactggtccattctgggagcccagtaagtgaca

SEQ ID NO: 558026 - DNA, 201 bp, Homo sapiens
actttggctcagcggtgccactgaggacccgtgtgactcgccagctcattctcaccaatcgctccccaatacggacccgtttctccctcaagtttgagtayttcgggagcccccaaaacagcctgagcaaaaagaccagcctgtaagtcttgcttctttcacttcccagggcagatgaagctggatggggtgtaccctgtt

SEQ ID NO: 558027 - DNA, 201 bp, Homo sapiens
aacgccacagtgttattgcggccactcaccactcctgtggggacagctccctttaccccatccctgccctctgtgtggtctccccacacacacttggaggygtggtgccctggcaggcaggagatggcaggggacagggctgtaggtaccctgggcttgcccacatgaggcccagcaactgggagccatgccagcatgccg

SEQ ID NO: 558028 - DNA, 201 bp, Homo sapiens
gtagaactttccacaccttttcccaggagatgcagggctggggccatatcgaggagggaagaggagacagtaggctgctgcctgggccaggacccaagacytggagtagggagtgtggagtggagggacagtagcagcctcccagagccaggtccttgccccgcccttggtggggctcacccaggggtccatttaattgct

SEQ ID NO: 558029 - DNA, 201 bp, Homo sapiens
ccttggtggggctcacccaggggtccatttaattgctccagcactcagcataaatggagtatctactgtgtgtgggttcctgtgtgggccgctgtagtgtsgaggatacagggatgaataaggtaaccagcaaggcacccctagtttagtctggagggatgaaacctgcatacgttatcctaccgttaagttgttaaatag

SEQ ID NO: 558030 - DNA, 201 bp, Homo sapiens
cgcagcgtcccgagcctcagcggcttcgtctgcgcccctcctcgctgcgcacccaagatatctcgcacttgctcaccggcgtcttccgcaacttgtactcwgccgaggtcatcggcgacgaagtgagcgcaagcttgatcaaggcccgcggcagcgagaatgagcgccacgaggagttcgtggaccagctgcagcaggtaa

SEQ ID NO: 558031 - DNA, 201 bp, Homo sapiens
agttgaactggaatcagcatagtctgctcagggcaggtgggtgggttgccagggcacagggcagccccagagcccagctcacctggtgccgcctggggaargcaccagccccaggtctcattaattctcgagtgaggccagaccactgtggtatttccccctgcctgagcccccagtcccagccctcctccctacctgcaa

SEQ ID NO: 558032 - DNA, 201 bp, Homo sapiens
caggtgtgcaccagtatgcccagcttatttatttatttatttatttatttgagatggagtctcactctgtcacccaggctggagtgcatggcgcaatctcrgctcactgcaagctccacctcccacattcatgccattctcctgcctcagccttctgagtagctggcgcctgccaccacacctggctaatttttttgtatt

SEQ ID NO: 558033 - DNA, 201 bp, Homo sapiens
gtgtgctccagatggtgctagaggaagtcccagagcctgtaaggtgagagaaactgggccctggatgagaagtgggcagctgggccttcccccaccttggrggttctcctggggaaggtatcaggtgagggggagtgggcagcctggtccccgcaggctttggggagtgagagcattttttttgccttgccctggcaaccc

SEQ ID NO: 558034 - DNA, 201 bp, Homo sapiens
gagttgctacggaaacatcatttgatctccccagaagattactacaccgatacagtgccgtttcactctgcacctaaaggtaatgcttctgtgctctcaakgcctctgataccatttgggggaagttcagtagggccacgttggccacctctgctgccatttccttgctcagaggtttttttcaccttttctttaatttcg

SEQ ID NO: 558035 - DNA, 201 bp, Homo sapiens
ccaccacaccaggctaattttttgtatttttagtaaagacagggtttcactatgttggccagactggtcttgaactcctgacctcgtgatccacccgcctyggcctcccaaagtgctgggattacagacgtgagacactgcgcccagcaatgttgctgttcttatacctatattcctctccctctttcctttttcgtcatc

SEQ ID NO: 558036 - DNA, 201 bp, Homo sapiens
gttcaagtgattctcccgcctcagcctaccgaatagctgggattacaagtgcctgccaccacgcctgggtacacaataaatctttattaaaagaatgactmaataaatctttgcgatcccaccaactttaggaatacaataaggaacactgtcttcctacataaactgtttttttttttctttaaaagaaatggggttagc

SEQ ID NO: 558037 - DNA, 201 bp, Homo sapiens
ggtacacaataaatctttattaaaagaatgactaaataaatctttgcgatcccaccaactttaggaatacaataaggaacactgtcttcctacataaactrtttttttttttctttaaaagaaatggggttagctgggcatggtggcttgtgcctgtaatcccagcactttaggaggctgagatgagaggattacttgagt

SEQ ID NO: 558038 - DNA, 201 bp, Homo sapiens
ctaagccacaaagcaagactccagttctaaaaaataaataaataagaaaggaaaataagactgggcgcagtggctcataactgcaatcccagcgctttggraggctgaggtgagtagatcatctgaggtcaggagttcaagaccagcctggccaacatggtgaaaccccatctctactaaaaaatatacaaaaaattagct

SEQ ID NO: 558039 - DNA, 201 bp, Homo sapiens
agtactgtgacagagtttgggctacaggtgtttgttagctatcaacacctgtgaggggaggggaatgaaagaaggagtgagccacggaagaagctgaactrtgatgggggcccaacaagccttgacaaatgcagcatgttgctctgaagagagtattgcctgtcaaagtttctctctttgggtcaaaatggccaggtcttt

SEQ ID NO: 558040 - DNA, 201 bp, Homo sapiens
ccccctgccagattcgggagctctataagcagcggctggatgagtttgaaatgttggagagacatatcactcaggcccaagcacgggctattgcggaaaaygagcgggtcatgagccaggctggagtacaggacctcgagagccttgtcaggttgcctccaggtgtgtataaagaactcccacatgcctgcccaattcccg

SEQ ID NO: 558041 - DNA, 201 bp, Homo sapiens
ttctgtgcaacactaacctctgacccacagatacttgtcaacctaaatagcagagagagactctctaaaagaaaatgatggacactgcaatgggaatacaygtgccattgtaaactgtgtgcatattcagggaggtaaaggaagacaaaggtttttaaaggaaaagtgaggaggattacacaatggttttgaagtaattat

SEQ ID NO: 558042 - DNA, 201 bp, Homo sapiens
cactttaatgattggaacatgagttcctgacttaccatgtcccctgagtcatggtaggtccaacctccagctgccatggctgggaagcgaggagctctctwacatagtctctgtcttagactccctcgcccacttgctgcccctcctccattggagggtcctccattggaagggtgtgaaggctgacctggtttcttcctg

SEQ ID NO: 558043 - DNA, 201 bp, Homo sapiens
tttgtcagggttttttaacacaagtgactccattttgattcagacaacttttacatcccattcaaattttactgactgtcctactgtggctttttcccccyctcaggcccaggatcctgtccaggaagtcatgtcacatgcaattgtcatgtctctttttgagatgccttcatttggaacaattccttgatcttttcttgt

SEQ ID NO: 558044 - DNA, 201 bp, Homo sapiens
tcaaattttactgactgtcctactgtggctttttccccccctcaggcccaggatcctgtccaggaagtcatgtcacatgcaattgtcatgtctctttttgagatgccttcatttggaacaattccttgatcttttcttgtctttcatcttcctgacagttcttgaccagacttatattctgtaggatggggatggttctgt

SEQ ID NO: 558045 - DNA, 201 bp, Homo sapiens
ttagctcaaataatacaacacagctttgcccaatggttggcctcttttaagtggctgatagatacttgatgagtttcttaaatctcaacattcccacaggkttctgagaaggaattttgttagatagtttaggcttggcggatgaagaaagtttgggtgtgggttcttcaaagtcagtctggctggaaacaccttgttctc

SEQ ID NO: 558046 - DNA, 201 bp, Homo sapiens
tttcttgtctttcatcttcctgacagttcttgaccagacttatattctgtaggatggggatggttctgtctgatgcttccccatgaccagacttaggcaarcattctgggcaacaggaccacataaagttattccttgttcatctcactgcagcacagcaggagggtcacgtgatgttaacctccatcccctgagtaggtt

SEQ ID NO: 558047 - DNA, 201 bp, Homo sapiens
gtaagatctccatcccttcaggaagttatgttagatagtgctgccccaaatcatcctggaccatccctagccagccccagctttccagagaggacataccwtgcctgtgtaggggaagccatccaagtcccaggggcagacagactatagtctgtgggtttcattctccttgccatttatttcctgacccgcctctgagca

SEQ ID NO: 558048 - DNA, 201 bp, Homo sapiens
ggcagagggcaggaatggggttgatgtggcaaaccttggaaactcatgtggtgagagacactgcagaagatcttcccaatattagggggtgatgtatagcytcttccactttaatgattggaacatgagttcctgacttaccatgtcccctgagtcatggtaggtccaacctccagctgccatggctgggaagcgaggagc

SEQ ID NO: 558049 - DNA, 201 bp, Homo sapiens
tgccttcattcataaataagaatgaaggaatagcatctttctggttgtttcctcctcatgacagttgagaggtccagtgttactgcaggctctgccctggyctctctccagcgtgatacccacagtcttcagtgggggcaaatactgtggcagcccagtctttttcttaattttcaattttaatttttattatttgtacaa

SEQ ID NO: 558050 - DNA, 201 bp, Homo sapiens
gagcattttttttgccttgccctggcaacccagccctgcaatgggctgagcacactaagctcgctaaactcactatgaggccaccccaggaactttggagytgtgccccaggcccattgttgctcttggggagccaaactggggggccctcggtggtggtgagtgtggaggaaaagctttgcccccatggtgtaaaccttc

SEQ ID NO: 558051 - DNA, 201 bp, Homo sapiens
  misc_feature (1)...(201): n = A,T,C or G
aaattagctggatatggtggtgtatgcctgtaatcccagctacttggaggctgaggcaggaggatcccttgaccccaggaatagcaggcaggagtgagctntgattgcgccactgtactccaggctaagccacaaagcaagactccagttctaaaaaataaataaataagaaaggaaaataagactgggcgcagtggctca

SEQ ID NO: 558052 - DNA, 201 bp, Homo sapiens
ggagctggccttctactggcagatcatgaagcccaacctgcagcccctcatgcctggagaaaccttcagcatggacagcatcaagtgctaccccgacaagragactgccttctccatcatgcccagaaagggggttctaagcccccacacagaccacgagttcatcctgagcttttctcctcatgaggttcagatggtgtc

SEQ ID NO: 558053 - DNA, 201 bp, Homo sapiens
gggaagagatttcttgcatttgggtctggggtccccattcctgctgggtctgctccctagggacacatggtcagagagcctggagtaggcctggggatgtsccctgagacccactggccatgcctggcctttggcatgagtttttgccctccccaggccattctctgtggccgcaggtgggcccagctttctgatttgccc

SEQ ID NO: 558054 - DNA, 201 bp, Homo sapiens
tgcttccccatgaccagacttaggcaaacattctgggcaacaggaccacataaagttattccttgttcatctcactgcagcacagcaggagggtcacgtgrtgttaacctccatcccctgagtaggttggtgtctgccaggattttctgcattaaattctccaaatcaaattataattgattagcattttatagagaggta

SEQ ID NO: 558055 - DNA, 201 bp, Homo sapiens
ccaggattttctgcattaaattctccaaatcaaattataattgattagcattttatagagaggtattctcagattacaccaatatcttgttcctcatcaamgctccatcgccataccaccagcattcactgaaaattcttttcttaatgcagaagtttaaagagtgatcctttagaaatacaactatgcaaagataagttg

SEQ ID NO: 558056 - DNA, 201 bp, Homo sapiens
gtggctgtgagtttgaaaacaacttccagataacttttttttttttcaagacagggtctcgcttcatcacccaggctggagtgcagtggtgcaatcttagstcactgcaacccctgactcctgggctcaagtaatcctcccacctcagcctccctagtagctgggaccacaggcacataccaccacacccggctagttttt

SEQ ID NO: 558057 - DNA, 201 bp, Homo sapiens
acttttttttttttcaagacagggtctcgcttcatcacccaggctggagtgcagtggtgcaatcttagctcactgcaacccctgactcctgggctcaagtratcctcccacctcagcctccctagtagctgggaccacaggcacataccaccacacccggctagttttttgtatttttagtagagacagggtcttgccatg

SEQ ID NO: 558058 - DNA, 201 bp, Homo sapiens
tgcccaggctggtcttgaactcctgggctcaagcaatccgcccacctcagcctcccacagtgctgggattacaggcgtgagctacctcacctggctggcamcatgtcttaagataatgttggctaatggagcaaacaacaaagtttgaaaacttccaacaagtcttctgttcgggcgctggtgacagccgggactgatcgc

SEQ ID NO: 558059 - DNA, 201 bp, Homo sapiens
gtccttctgatggctaggctaaggggaggaagaattcctgccatgccccagccttctccaggacaacctgctggaacgcagtggtgttttcagggcactgwgtttgccttgcagctgagggattttcacagtgtgctccagatggtgctagaggaagtcccagagcctgtaaggtgagagaaactgggccctggatgagaa

SEQ ID NO: 558060 - DNA, 201 bp, Homo sapiens
cctcaagatcccagcagtaggtccttcttctcagaaataatttcatccatacccaatgtaaaatgtagccatagtgggcagtacctgatgaccagagactmcctgttggtgaaggtgtgggacctcaacatagagagcaggctgggaccacaccgggaccacgagtacctgcacagcaagctctgctttctctatgagaat

SEQ ID NO: 558061 - DNA, 201 bp, Homo sapiens
gatcccagcagtaggtccttcttctcagaaataatttcatccatacccaatgtaaaatgtagccatagtgggcagtacctgatgaccagagactccctgtyggtgaaggtgtgggacctcaacatagagagcaggctgggaccacaccgggaccacgagtacctgcacagcaagctctgctttctctatgagaatgactgc

SEQ ID NO: 558062 - DNA, 201 bp, Homo sapiens
cagcctcctcatttgatagaggagagactggaaggggcagggcttccccaaggtcatacggctgatgggtagcggcatcacatctgatccctcttgtctarttttcagtctgtggtgttctcccactgtgaagaataactatgttttataatggaaataattgccaatgttatagtattgtaagataattccctctctaca

SEQ ID NO: 558063 - DNA, 201 bp, Homo sapiens
taatggaaataattgccaatgttatagtattgtaagataattccctctctacagttctctgcactctattcttttgagctctcaaaaataatgttgggatwtggggtttgttagatggtctcagattaggggacgcagagctgctgaaacccaaccctagactacagccacccccagagctccaagggagatgcacatgag

SEQ ID NO: 558064 - DNA, 201 bp, Homo sapiens
ctctgcactctattcttttgagctctcaaaaataatgttgggatttggggtttgttagatggtctcagattaggggacgcagagctgctgaaacccaaccmtagactacagccacccccagagctccaagggagatgcacatgagcaacaaagacaaaataaagcaaagtggctccttacagggacaagtgtcctctctca

SEQ ID NO: 558065 - DNA, 201 bp, Homo sapiens
accctagactacagccacccccagagctccaagggagatgcacatgagcaacaaagacaaaataaagcaaagtggctccttacagggacaagtgtcctctstcagtcagggcaggaagaatggaatgtaaagagccctccccagatggggacacttttcttcctgctctttcccttcccctctccctttgtgtgtgtgcct

SEQ ID NO: 558066 - DNA, 201 bp, Homo sapiens
taaaacttattgagacttgttttatgggctattctggagaatattccttgtgcactcgagaaaaataatgtattctgctgttattgtgtagagtgttgcckgttctgtttggtttatagtgctgtttaaatcttctatttcaatgtttatcttctggttagttgtttttccattattaaaaatgggctgttgaagtctcca

SEQ ID NO: 558067 - DNA, 201 bp, Homo sapiens
gacaaaataaagcaaagtggctccttacagggacaagtgtcctctctcagtcagggcaggaagaatggaatgtaaagagccctccccagatggggacactwttcttcctgctctttcccttcccctctccctttgtgtgtgtgcctggcatgggaggaggagcagaccgggggcggggtgggggtgggggcgggtaaatga

SEQ ID NO: 558068 - DNA, 201 bp, Homo sapiens
aggtttcaaaggtattggtagtattcctttttttcttcttcattctccctccgctcccccacttccctccttttctttctttctagtggaaaacttctcayatatataaaaacagaaagaatagtataataaacctccacatactctttcctcccttcaataattgtcaactcactgcaagtactgtttcatccatatccc

SEQ ID NO: 558069 - DNA, 201 bp, Homo sapiens
actgacaccatccatcagcatgctcacaccatccatcagcactgacaccatccatcagcatgctcacaccatccatcagcactgacaccatccattagcaygctcacaccattatttttctcatagcaaagatatttatttgtacccagaaaacaagggatacatctagaggatgacatttcaagatgttccaagaaagac

SEQ ID NO: 558070 - DNA, 201 bp, Homo sapiens
ttcccatgatcagttatgaatggcatcaggtgttgaaattctgattcattctctataaagttcttatcaaactttcacttaatagttaacagcctagatgrctgccagatgactattgtccagatccattttttcttcaatcagggcttacaaaatggtaatttctaattctattattccatctacatttattagcttgat

SEQ ID NO: 558071 - DNA, 201 bp, Homo sapiens
agagcacttcataggtgatgctgtgtgtttccctcaggaggtacatgatatgtggttgctatctctcctttcatgatgctggcagcctttttattttattwttttattaggggttacaaattataatgaaatgctaatggtaataataattctatctttatttatttgtcagctgaactacttctataaagacaaactttt

SEQ ID NO: 558072 - DNA, 201 bp, Homo sapiens
ggggaaggtatcaggtgagggggagtgggcagcctggtccccgcaggctttggggagtgagagcattttttttgccttgccctggcaacccagccctgcartgggctgagcacactaagctcgctaaactcactatgaggccaccccaggaactttggagctgtgccccaggcccattgttgctcttggggagccaaactg

SEQ ID NO: 558073 - DNA, 201 bp, Homo sapiens
gaaagagcacttcataggtgatgctgtgtgtttccctcaggaggtacatgatatgtggttgctatctctcctttcatgatgctggcagcctttttattttwttattttattaggggttacaaattataatgaaatgctaatggtaataataattctatctttatttatttgtcagctgaactacttctataaagacaaact

SEQ ID NO: 558074 - DNA, 201 bp, Homo sapiens
gtggggaaagagcacttcataggtgatgctgtgtgtttccctcaggaggtacatgatatgtggttgctatctctcctttcatgatgctggcagcctttttwttttattattttattaggggttacaaattataatgaaatgctaatggtaataataattctatctttatttatttgtcagctgaactacttctataaagac

SEQ ID NO: 558075 - DNA, 201 bp, Homo sapiens
ccaacctgcagcccctcatgcctggagaaaccttcagcatggacagcatcaagtgctaccccgacaaggagactgccttctccatcatgcccagaaagggrgttctaagcccccacacagaccacgagttcatcctgagcttttctcctcatgaggttcagatggtgtcatctcagtagccacacatggttggatcatgta

SEQ ID NO: 558076 - DNA, 201 bp, Homo sapiens
ttaatcattttgatttaaagtgagatacgtacgactcttcttttcacttgaagacttagaggctattgtagggttatcagttggtctaatttcaatattgytgtgtctcaaggaatagggaggcctgaggagagggagagagacggaaatgaccagtaagtagagcagtcaaaatgcacacagcatttaccagttgagccc

SEQ ID NO: 558077 - DNA, 201 bp, Homo sapiens
gtattttctaatttttcttgtggtttcttatttgacttgtttatgaatgtgttatttaatttgcacatattttgtttcacaaatttctttctgttgttgakttctaatttgattctattgttgttggagaacccactttatataattatagtcgtttaaaacttattgagacttgttttatgggctattctggagaatatt

SEQ ID NO: 558078 - DNA, 201 bp, Homo sapiens
ctaatttttcttgtggtttcttatttgacttgtttatgaatgtgttatttaatttgcacatattttgtttcacaaatttctttctgttgttgatttctaayttgattctattgttgttggagaacccactttatataattatagtcgtttaaaacttattgagacttgttttatgggctattctggagaatattccttgtg

SEQ ID NO: 558079 - DNA, 201 bp, Homo sapiens
aagtctccaaccattattgttgaattgctgatctctccttcaattctgtcagtttttgcttcatgtattttgtggtgctgttgttagatacatacatgttkataattgttatatctttctaatttatctttttataattataaaatatccttcattgtctctaataaccatttttgtcttaaagcctattttatctaacat

SEQ ID NO: 558080 - DNA, 201 bp, Homo sapiens
ccaaccattattgttgaattgctgatctctccttcaattctgtcagtttttgcttcatgtattttgtggtgctgttgttagatacatacatgtttataatkgttatatctttctaatttatctttttataattataaaatatccttcattgtctctaataaccatttttgtcttaaagcctattttatctaacattcatat

SEQ ID NO: 558081 - DNA, 201 bp, Homo sapiens
gtgggtggatgtcttgagctcaggagtttgagagcagcctgggcaacatggcaaaaccccttctctacaaaaaatacaaaaattagctgggcgtgatggcrtatgtctctggtcccagctattcaggaggctgaggtgggaggatcacttgtgcccaggagttagaggttgcagtcagccgagatcatgccactgcactcc

SEQ ID NO: 558082 - DNA, 201 bp, Homo sapiens
ccgtttcactctgcacctaaaggtaatgcttctgtgctctcaaggcctctgataccatttgggggaagttcagtagggccacgttggccacctctgctgcyatttccttgctcagaggtttttttcaccttttctttaatttcgatggtgactgttgggaaagtcaaatctgagcatctgagcatgccaatttcttgctag

SEQ ID NO: 558083 - DNA, 201 bp, Homo sapiens
agccacatggcgcatgaaggagagcccagtctccctccaggaaaggcctgaggatgtaagtcaggcactgctggttcctctggtgcccccacaatgagccsgtttagcttgccctggtgaaacttgccctggtgtgtttagatcagagcttcgaggctggtggaggaaaagcctgcctggtgacttcggcctggcggtgcc

SEQ ID NO: 558084 - DNA, 201 bp, Homo sapiens
gtgctgttgttagatacatacatgtttataattgttatatctttctaatttatctttttataattataaaatatccttcattgtctctaataaccattttkgtcttaaagcctattttatctaacattcatatatctcctggagctctcttttgggtactgtttgcatgatatatatttttccatcctttttctttgaaac

SEQ ID NO: 558085 - DNA, 201 bp, Homo sapiens
gtcttaaagcctattttatctaacattcatatatctcctggagctctcttttgggtactgtttgcatgatatatatttttccatcctttttctttgaaackatttgtgtctttgaatctaaagtgtctcttgtaaacagcatatacttggatcatttttttaaaatccattttgctaatctctgccttttgattggattgt

SEQ ID NO: 558086 - DNA, 201 bp, Homo sapiens
gcttcggggcccaggccacggccagagccacagccttctgtggatgtgggctggcagctgccagggagcgggaccaggaccagagactgctctcagatggscaaggcgctccacctgacaatgcctcttcctgttgaggccacttcccttctagggcacaggctcatgcacagggcctggactccatttgggatgggagtg

SEQ ID NO: 558087 - DNA, 201 bp, Homo sapiens
gtggatgtgggctggcagctgccagggagcgggaccaggaccagagactgctctcagatggccaaggcgctccacctgacaatgcctcttcctgttgaggscacttcccttctagggcacaggctcatgcacagggcctggactccatttgggatgggagtggctcatgagggagggctcccatggggacccagcctctca

SEQ ID NO: 558088 - DNA, 201 bp, Homo sapiens
acttgtagatccaacactttaggaggctgaggcaggaagattgcttgaggccagtagtttgagaccagcctgagcaacatagtaagaccctgtgtctactaaaaaaaaaaaaaaaaaaaaaagtcctcaggctgggagctttgtgcaggctgcctggctgggagggagagtggagatggcgggaagtgggagagaagacag

SEQ ID NO: 558089 - DNA, 201 bp, Homo sapiens
gcctcttcctgttgaggccacttcccttctagggcacaggctcatgcacagggcctggactccatttgggatgggagtggctcatgagggagggctcccawggggacccagcctctcagggagtagagaggctgaccacgcaggaccctgagtagcttgcctctggattccaggctcccaggaggagggcacatgtagcct

SEQ ID NO: 558090 - DNA, 201 bp, Homo sapiens
gcattctgtagggtgatgtcagatgtcatttgactgtcttatgagcattttcacaaagcaaatgcagatagccctagcatcacatcacaaacctgagcctygctagtccacacctttagtctgggagctacctccaccaatgtccaagctgcctccaagatcttcgcttggttcttcagtctctcttgggtcttccctccc

SEQ ID NO: 558091 - DNA, 201 bp, Homo sapiens
gggttcatgtgattctcctgcctcagcctcccaagtagctgggattacaggcacacaccaccacaccaggctaattttttgtatttttagtaaagacaggktttcactatgttggccagactggtcttgaactcctgacctcgtgatccacccgcctcggcctcccaaagtgctgggattacagacgtgagacactgcgcc

SEQ ID NO: 558092 - DNA, 201 bp, Homo sapiens
ccagccaacatagcccatgactggcccaggtagctgttggagcccagttgtggtgctgctcctgcccgtggctgactggggagctctgagtgtcatgggayataaggccacatccatgtgcaccagaagcatctgccctctgctccccatccctcggggccttcaagggcagtttcttttgtccagataacctcccaacaa

SEQ ID NO: 558093 - DNA, 201 bp, Homo sapiens
ctggggctcagtctcccctagaagaggccctgtgtgcagagagatgagggccatccaacctcacctgcctcatgagctcaaaaccaggtgaggggccagastgtgggaaatcagggaaggctccctgcgggaggaaggacatgaagcctgaacaccatttaatcaaggaagggaaacacgttgacagccaggccaaaagaa

SEQ ID NO: 558094 - DNA, 201 bp, Homo sapiens
agggggctcaggagctgtgggttaggcagtgttttttttttcacaaggccaaacgtgggacagaggcagggacactctaggatgtgcttccaggtgtgccrgctcctagctaacggtgggtttgtgtttagttcagaagcggagagcctggggcactcctcctactctgtggatgatgtgattgtcctggaaatcgaggtg

SEQ ID NO: 558095 - DNA, 201 bp, Homo sapiens
gatacaaggtctgaataaaagaaggagaaaaatgggtattaaaggactaagaattgggaggacctaggatatttaattagagagtgcctaagggggttcascgcaattacttgcttggtttagaagtgatctccttgaggatagatttccatgatggaaaggaaatgagaggttctaagagacgggctagcggcttgtaac

SEQ ID NO: 558096 - DNA, 201 bp, Homo sapiens
gcaggagtgtgaggaggagacagcctcagcggacaagcagctggtgctccaagcacaggagaacatgctggtcagtgggggagtctgcagcccttgcctcratggcacaccctcacatgtgtacagacagcacccctgcacgccaccctcaggtgcttgtacccagacgcaaactgcatgcctgaccctgccataccctgc

SEQ ID NO: 558097 - DNA, 201 bp, Homo sapiens
ggcttggcggatgaagaaagtttgggtgtgggttcttcaaagtcagtctggctggaaacaccttgttctccccttcccttctatgaagtgaagagtgtctycagatggtgtatagacagcgagttgctacggaaacatcatttgatctccccagaagattactacaccgatacagtgccgtttcactctgcacctaaaggt

SEQ ID NO: 558098 - DNA, 201 bp, Homo sapiens
gcatggagggaagccctgtgggccacggtaggctagaagggaattcgagctgggcatgaaaaggatgctccggggccattgttagtgggtttggggctgaratgagtgatcctgcctctggtcccagcatccagctgcctcgttgtctatcctgggagggtgtggtgcttcggacacgttgaggggctttgtcagcatcag

SEQ ID NO: 558099 - DNA, 201 bp, Homo sapiens
cacatctgctgcccaataccaagaattatgtaagtgcttggagttgcagttgaaccaagagaaggaaaaactgaagacatagaaaagcaagggagcgtgtwcctgatgagttggagcagggacttatgggttttcccatgcaggaaaagagcagcttctcatcctttcagaatggagggaagcctgggtagagaggcagag

SEQ ID NO: 558100 - DNA, 201 bp, Homo sapiens
gacataaaagttggggttgatgctgttgatgctgttgtagatagagagctgaggctgtctaccagaatgtctacaccacatagcttctctatgtgggctgkgcttccttacagtatggcaatctcaggttaatcagacttttacatgacaatgcaagtgagtatctgcacttttttttttttttttttgagatggaatctt

SEQ ID NO: 558101 - DNA, 201 bp, Homo sapiens
ctgacctcagatgattcactcgccttggcctcccaaagtcctgggattacaggcgtgagccattgtacctggccaagtatctgcacttctaagtgagtatyctagcaagcaagaaggagattgcatcacattttatgacctaatcttgtaagttgcacagcactacatcctctgcatgccgtagattacaaacaagtcact

SEQ ID NO: 558102 - DNA, 201 bp, Homo sapiens
gaatcacctcatgctcagctgtgaatagcaattacttagtaacttgaatataacatgaattactaatctaaccagtagtatgatataactatattggaaasatgggggataggaagggcgtgtcatatggtgagtcagatatgggagagggaagagggaatatccatatcctccatctataattaatacctaaaactgaac

SEQ ID NO: 558103 - DNA, 201 bp, Homo sapiens
ggctgtgccaacatgtggggcgagtactgggacaacctcatctgcacggtaagggtacacaagagggcagtggcctggggggtggagagtctgcccagccytcgccttcagcctctctcccctccaacacctggccctcagactctcaaacctcaccaggttgaaacgcgatgcccaccgagcttgggatgggcattcgtg

SEQ ID NO: 558104 - DNA, 201 bp, Homo sapiens
gtgtccaggagtaaccatggcacagagcctgtgggcagggagtcctgcttcagagcccgcctgggtttctggggaggtaatccctgcagctggcgggtggyccgcagctggggatgtttgaatggtaggggtacagtgggagcaaagaccagagaaggaggtaaaggaaagaactgaccagctctcccctgggaagagcag

SEQ ID NO: 558105 - DNA, 201 bp, Homo sapiens
atgtggggcgagtactgggacaacctcatctgcacggtaagggtacacaagagggcagtggcctggggggtggagagtctgcccagccctcgccttcagcytctctcccctccaacacctggccctcagactctcaaacctcaccaggttgaaacgcgatgcccaccgagcttgggatgggcattcgtgtctgaggcagcc

SEQ ID NO: 558106 - DNA, 201 bp, Homo sapiens
ctcatctgcacggtaagggtacacaagagggcagtggcctggggggtggagagtctgcccagccctcgccttcagcctctctcccctccaacacctggccytcagactctcaaacctcaccaggttgaaacgcgatgcccaccgagcttgggatgggcattcgtgtctgaggcagcctctggggttctggctgaggcattt

SEQ ID NO: 558107 - DNA, 201 bp, Homo sapiens
acatcaccttggaggccctgcactgccagcatctggagaccgtcctggagctggaggtggaaaatggtgcctggaggtaagggtgccgtgggaagagccaytacaacaaactatgcatattcgtgatgtatttatctatattatatatttatctagagatgttctggatttaaaactattgaatccagaaaattagtattc

SEQ ID NO: 558108 - DNA, 201 bp, Homo sapiens
tgtggcatacaactgaagggaaggccggagtgctgggggaacgtgttgaagggccaggctcccctgtggaggggaggcagagtgtaggctgagtctaagaggaagggtaagccgatgtgggccaggggagcatgtgggggcaaagagtgctctgggcctgagaaagggttaggagaggaagctggtgacactgaagagggg

SEQ ID NO: 558109 - DNA, 201 bp, Homo sapiens
tggcagggctggggtctgtaccagctgagctcaagccctggtggctggctgctcccaggatcctcacttgtcacttttgtcatgcacagggatgttcccasgaaaaggtggaatggtggctcctggaatgacctgccagtacattgtccagttttttcccgactgccttggggattttgatgattttattttagtggagac

SEQ ID NO: 558110 - DNA, 201 bp, Homo sapiens; identical to SEQ ID NO: 408699

SEQ ID NO: 558111 - DNA, 201 bp, Homo sapiens
gacacccctatccctcagcagggagggaaaggaggacctccccctgcttcttgatccccatgacagtgggtggtgcaggggatcttgtctgtttagagtgrgtagatgatacatacatgggctctggttctgctcctagctggctgcatggcattgtacagtacacttaaactcttccgaaccccagattcctcatcaggg

SEQ ID NO: 558112 - DNA, 201 bp, Homo sapiens
cagggggtgggggtggtctcatgaagctgtggagtgctctcctcctcaacacagaccttctctggggaggggcaggacagtgttcggtgcctggcgctgcytgctggatgccaccgtggctgggggccaaacccgactccaggcgtctgaccgataccgtgacctagcagggggtacagggcggagcgccaaggagcaggt

SEQ ID NO: 558113 - DNA, 201 bp, Homo sapiens
aggaactgagagagggccagtatggctggagtactgtgagcaagggaacaagcgcttgaaaagaggtcagagagattgcgggggccagctcatattgaacstggtggaccatggtaaggaacagtggattttattttaaatgcgtgcagaaggcactagaagattttgagcaggagttgtgtgtatgcaacatttttagtg

SEQ ID NO: 558114 - DNA, 201 bp, Homo sapiens
gggagggaaaggaggacctccccctgcttcttgatccccatgacagtgggtggtgcaggggatcttgtctgtttagagtgagtagatgatacatacatggrctctggttctgctcctagctggctgcatggcattgtacagtacacttaaactcttccgaaccccagattcctcatcagggataaccctttctctgcctat

SEQ ID NO: 558115 - DNA, 201 bp, Homo sapiens
agaataacaagggggtagaatttagagggaggcctctctgaataggtggcctaactgtcaagaaggagctggccttgcaaagatctaggggaagaacattscagagagaagaaatggtgagtgcaaagggtctgaggtgggaataactttgtaggctcgaggaactgagagagggccagtatggctggagtactgtgagca

SEQ ID NO: 558116 - DNA, 201 bp, Homo sapiens
aacactaccaatggagttcctgccctcacagtctggttaagagagacagacagcaaataaatacttagattaagatgaaaataaaacaaggtactatgatraagaataacaagggggtagaatttagagggaggcctctctgaataggtggcctaactgtcaagaaggagctggccttgcaaagatctaggggaagaacat

SEQ ID NO: 558117 - DNA, 201 bp, Homo sapiens
atgcatttattgaggatctgtatataataggcactgttctagacattatggatacagtggagaacactaccaatggagttcctgccctcacagtctggttragagagacagacagcaaataaatacttagattaagatgaaaataaaacaaggtactatgataaagaataacaagggggtagaatttagagggaggcctct

SEQ ID NO: 558118 - DNA, 201 bp, Homo sapiens
tatattgcatactggtggagattgggcttctagtgtacctgtaactcaaatagtgaacattgtacctgataggtaatttttcaaccctcgcccctgcctcyactcctacctttgccccctttggagtcctgggagtctgttatttccatctctatgtccatgtgtacccgttgtttagctcccacttataagtgagaacat

SEQ ID NO: 558119 - DNA, 201 bp, Homo sapiens
cccttctcctcccagcttctccccacctgcacctacctctgtgttggatgggccccctgcacctgtcctgcctgggggtgagtggaaggaactgggagccbtgggaggctaacagacaggaagaaggaggaagcttggactcccaggtcacgctctggtcctctccgtgccttcaggcatcttgcttggtggagagcactt

SEQ ID NO: 558120 - DNA, 201 bp, Homo sapiens
actgccagctctgctcaaggccagttttaacccagacacccctatccctcagcagggagggaaaggaggacctccccctgcttcttgatccccatgacagkgggtggtgcaggggatcttgtctgtttagagtgagtagatgatacatacatgggctctggttctgctcctagctggctgcatggcattgtacagtacact

SEQ ID NO: 558121 - DNA, 201 bp, Homo sapiens
ctaacataggagtcatattattaaaaatgcctacctcatggggtagtggtgaggattgaatgaattggtacacgtgaagtgctagcagaacacttgagacrtagtaaacataagcgttcaatacatattggctgttgaaatatttgtcagctacacccccccaccgaatgcaagcatttggccacttcctgtattgagaag

SEQ ID NO: 558122 - DNA, 201 bp, Homo sapiens
attttggacagctggcttaacctgggtctcacttctaacataggagtcatattattaaaaatgcctacctcatggggtagtggtgaggattgaatgaattrgtacacgtgaagtgctagcagaacacttgagacatagtaaacataagcgttcaatacatattggctgttgaaatatttgtcagctacacccccccaccga

SEQ ID NO: 558123 - DNA, 201 bp, Homo sapiens
ttcttgatccccatgacagtgggtggtgcaggggatcttgtctgtttagagtgagtagatgatacatacatgggctctggttctgctcctagctggctgcrtggcattgtacagtacacttaaactcttccgaaccccagattcctcatcagggataaccctttctctgcctatcttatagcactagtggggctcaaagga

SEQ ID NO: 558124 - DNA, 201 bp, Homo sapiens
ccagccgacccatccacagccctcaccctaggcctggcctctccagatactggataggaatgctcccccacctaacccctcccaaccccctcccacccacwtaaacacacaggaaccctccctcaaagcccttgactccacaccactgcccccaaccccacaatcaaccttagggcagaatccctctccctcttccagacc

SEQ ID NO: 558125 - DNA, 201 bp, Homo sapiens
taagtctaatatctgttcacattgctgggtgagcaggctcggaaccagcacggcgaggtaggctttgtccctgagcgatatctcaacttcccggacctctmcctcccagagagcagccaagacagtgacaatccctgcggggcagagcccacaggtaagaaagggaaattttgggttagaggaccctgggtatggagaaaa

SEQ ID NO: 558126 - DNA, 201 bp, Homo sapiens
catcagggataaccctttctctgcctatcttatagcactagtggggctcaaaggagagaatggatgtgaacgtgttttaaacttctaagtgctctgcacaygagggcctttctcatgaagaatgtcttcttctctccttcctatacctcatgcccatcacctgtcaaatctggaacgagcctattttacagtagaggtctg

SEQ ID NO: 558127 - DNA, 201 bp, Homo sapiens
aacctggtggaccatggtaaggaacagtggattttattttaaatgcgtgcagaaggcactagaagattttgagcaggagttgtgtgtatgcaacatttttwgtgtagtgccaggcacatagtaagcactcaataatgtgagaatccattctggatctggcttctcaattggtcttggaaggactctgggggtctagggctt

SEQ ID NO: 558128 - DNA, 201 bp, Homo sapiens
ggaccggaactaccttctcttctgtcatgaccctatctagggtggtgaaatgcctgaaatctctggggctggaaaccatccatcaaggtctctagtagttytggcccacctctttccccaccctggctccatgacccaccccactctggatgccagggtcactggggttgggctggggagaggaacaggccttgggaatca

SEQ ID NO: 558129 - DNA, 201 bp, Homo sapiens
ggccccccagggccacctgaactctctgaccctgaacaggtgaggcttaccttctccctgaactccccaggcacctctgggttgaccctcccaccccaatraagcctcatattcatcttaatgcctcctctgctccccagttttacctcctacagtggcctgggcctcccatctcctatgggggggcagggaaaagggaaa

SEQ ID NO: 558130 - DNA, 201 bp, Homo sapiens
agagctgcttggccccccagggccacctgaactctctgaccctgaacaggtgaggcttaccttctccctgaactccccaggcacctctgggttgaccctcycaccccaataaagcctcatattcatcttaatgcctcctctgctccccagttttacctcctacagtggcctgggcctcccatctcctatgggggggcaggg

SEQ ID NO: 558131 - DNA, 201 bp, Homo sapiens
agcccacaggtaagaaagggaaattttgggttagaggaccctgggtatggagaaaaattgttaggggttgtagccctggggtgtcatggtcctggggcacygctacccacctccctctcaccgtctctcctgggcctctgtagcattcctggcacaggccctgtacagctacaccggacagagtgcagaggagctgagctt

SEQ ID NO: 558132 - DNA, 201 bp, Homo sapiens
gtaggctttgtccctgagcgatatctcaacttcccggacctctccctcccagagagcagccaagacagtgacaatccctgcggggcagagcccacaggtamgaaagggaaattttgggttagaggaccctgggtatggagaaaaattgttaggggttgtagccctggggtgtcatggtcctggggcactgctacccacctc

SEQ ID NO: 558133 - DNA, 201 bp, Homo sapiens; identical to SEQ ID NO: 408734

SEQ ID NO: 558134 - DNA, 201 bp, Homo sapiens
tggaatcacagttgtgcctaactcaaagggttattacgaggcttaagtgaaatcatcatatatcattctttgcataatttctggcatagagtcctcagtamatttttattatgagcataatagaatgattaagaagtagggttctggggcagtctgtaagggctttgagtaccagccactccacttatgagctgtgcaatc

SEQ ID NO: 558135 - DNA, 201 bp, Homo sapiens
agtgcgagagagcatccgccgggcacaggtgaggcacacccctgaggttagagatcccaccttctcaggcaagccccactccctctactcctctttctgayggtgggaggaaggaagggagaagcagagagtaaacactgccgtcagccaggttccactaacttacttcctccccatggcaggtgagccaggtgaaggggg

SEQ ID NO: 558136 - DNA, 201 bp, Homo sapiens
atagttaagagcacagtttttggagctagaccgacataggttcaaattctcttctgttgcttcctagttctgtagccccaggtaagggagtgacttaaccyctctggacttcaatttcctcatcactaaagtagggccaataatagcacccacctcatagggaagattaaatgacataatgtatgtgatgcaactagcaaa

SEQ ID NO: 558137 - DNA, 201 bp, Homo sapiens
caagatccagaaccatgggcatcgggtgaggtgggggggcacaggtgtcatgtgcaccttcttgtctcagcaagaagagctgagagaggggatcttggagycattgagggtgtcatggagctacagaggggagggaaaggtattttaaggtaacagtgtggcacaatagttaagagcacagtttttggagctagaccgaca

SEQ ID NO: 558138 - DNA, 201 bp, Homo sapiens
gggagcagacaacctcccaggtgagggctgtggcctctaagagcttccccggggatcctttttacccttccctcccaatgcagccctctttgcttcacacrttgtcctttttcttccaagaagtgctagggacagggttggagagtgagtcagtgaatgagtgactttgacttttcccaacccctaggtaagctgggagca

SEQ ID NO: 558139 - DNA, 201 bp, Homo sapiens
ccaggaggaactgccagctctgctcaaggccagttttaacccagacacccctatccctcagcagggagggaaaggaggacctccccctgcttcttgatccycatgacagtgggtggtgcaggggatcttgtctgtttagagtgagtagatgatacatacatgggctctggttctgctcctagctggctgcatggcattgta

SEQ ID NO: 558140 - DNA, 201 bp, Homo sapiens; identical to SEQ ID NO: 408736

SEQ ID NO: 558141 - DNA, 201 bp, Homo sapiens
agggagggaaaggaggacctccccctgcttcttgatccccatgacagtgggtggtgcaggggatcttgtctgtttagagtgagtagatgatacatacatgsgctctggttctgctcctagctggctgcatggcattgtacagtacacttaaactcttccgaaccccagattcctcatcagggataaccctttctctgccta

SEQ ID NO: 558142 - DNA, 201 bp, Homo sapiens
ttaacctctctgagcttgtttcttcacatgtaaaatggggataatacctactttagcaggctcactgtcataattagagataatcgaggtaaagccttctycttttttttttttttgagacagagtttcgctcttgttgcccaggctggagtgcaatggtgcgatctcagctcaccgcaacctctgcctcccgggttcaaa

SEQ ID NO: 558143 - DNA, 201 bp, Homo sapiens
tctaggaccggaactaccttctcttctgtcatgaccctatctagggtggtgaaatgcctgaaatctctggggctggaaaccatccatcaaggtctctagtrgttctggcccacctctttccccaccctggctccatgacccaccccactctggatgccagggtcactggggttgggctggggagaggaacaggccttggga

SEQ ID NO: 558144 - DNA, 201 bp, Homo sapiens
taacctctctgagcttgtttcttcacatgtaaaatggggataatacctactttagcaggctcactgtcataattagagataatcgaggtaaagccttcttyttttttttttttttgagacagagtttcgctcttgttgcccaggctggagtgcaatggtgcgatctcagctcaccgcaacctctgcctcccgggttcaaac

SEQ ID NO: 558145 - DNA, 201 bp, Homo sapiens
ttctgtcatgaccctatctagggtggtgaaatgcctgaaatctctggggctggaaaccatccatcaaggtctctagtagttctggcccacctctttccccmccctggctccatgacccaccccactctggatgccagggtcactggggttgggctggggagaggaacaggccttgggaatcaggagctggagccaggatgc

SEQ ID NO: 558146 - DNA, 201 bp, Homo sapiens
gtgcaatggtgcgatctcagctcaccgcaacctctgcctcccgggttcaaacgattctcctgtatcagcccctcgagtagctgggattacaggcacgtgcygccacgcccggctaattttctatttttagtagatacagggtttctccatttggtcaggctggtctcaaactcctgacctcaggtgatccacctgccttgg

SEQ ID NO: 558147 - DNA, 201 bp, Homo sapiens; identical to SEQ ID NO: 408745

SEQ ID NO: 558148 - DNA, 201 bp, Homo sapiens
ctggaaaggggaacgctcggggcgtcggggaagcgggaccagggtcgtggtagagagcttgcgttgccgctgacctcttgccgaaaggcgaaacagcactsctggcccggacagctccctggttgggtagggggtggggccggacctcagccggacgtcttagacgtgcttgtttcagatcctgaggacggcattcctacc

SEQ ID NO: 558149 - DNA, 201 bp, Homo sapiens
tgattcccaaggcctgttcctctccccagcccaaccccagtgaccctggcatccagagtggggtgggtcatggagccagggtggggaaagaggtgggccaraactactagagaccttgatggatggtttccagccccagagatttcaggcatttcaccaccctagatagggtcatgacagaagagaaggtagttccggtcc

SEQ ID NO: 558150 - DNA, 201 bp, Homo sapiens
cccaacacctcgctccatatgatagagcgtggcagctgggagcaggcccctgcccgtggtgggcccctaaagcaatagcaccgtaggccccctgccctctyagcacaagaggcccaggccctggcctggccttcgtgccctttattcattgtcaataaatccgctcagaccattacagctgcttcgcatcctggctccagc

SEQ ID NO: 558151 - DNA, 201 bp, Homo sapiens
atatgctcttcctgcttgtgctggtcttcttcctcatgggcctggtaggcttcatgatctgccacgtgctcaagaagaagggctaccgctgccgcacgtckaggggctctgagcctgacgatgcccagcttcagccccgtgagtgaggagcctggaaccctggctcagtcacctttcacccttctccccacacctctgcct

SEQ ID NO: 558152 - DNA, 201 bp, Homo sapiens
cagagctcacgctctccgccccgcacacctgcgctccgccccctggtcctgggcccgcgacgggtgaaggcatttgggaagccagggcggctgcggaggcratctccctgacccagggccggagttgcccggagcctgccaccgctctcagccagcccgcatccttctctgttcttccctccccccgcctgccacggcgcg

SEQ ID NO: 558153 - DNA, 201 bp, Homo sapiens
cgctcggtcggggcatctgagggcaggagctgcgccaggcgtaccggatagaccagtggacaacacccacgccggaccgcctgtcccctacccggacccaractcggcgccgcacattgccccgggggggcccggcgcagtcacgcgcgcgcagagctcacgctctccgccccgcacacctgcgctccgccccctggtcct

SEQ ID NO: 558154 - DNA, 201 bp, Homo sapiens
gcaggtggggcaggtgctccagggaaaggggggctgaggtagggggcccagtgatcaggcacctgatcccaaaagtgggccttggctctttcctcctggaytgggagctccggcagaagtcaggctacacaatgtgccccacaatctgagaaggcctcccctaccttaggccagagggaagtagccaccaaactcaggatg

SEQ ID NO: 558155 - DNA, 201 bp, Homo sapiens
tggaaaggggaacgctcggggcgtcggggaagcgggaccagggtcgtggtagagagcttgcgttgccgctgacctcttgccgaaaggcgaaacagcactcytggcccggacagctccctggttgggtagggggtggggccggacctcagccggacgtcttagacgtgcttgtttcagatcctgaggacggcattcctaccc

SEQ ID NO: 558156 - DNA, 201 bp, Homo sapiens
cagtgtccttgggagggacagaagcgcgaacaagctggaaaggggaacgctcggggcgtcggggaagcgggaccagggtcgtggtagagagcttgcgttgycgctgacctcttgccgaaaggcgaaacagcactcctggcccggacagctccctggttgggtagggggtggggccggacctcagccggacgtcttagacgt

SEQ ID NO: 558157 - DNA, 201 bp, Homo sapiens
cagcccgcatccttctctgttcttccctccccccgcctgccacggcgcgggtatccgcagccacagcccggggccggtgaggcggcgaagggggaggggakgaatcaagggatgagcgccggaagggcgtcgggggccctgagccgcactaggacgcccctggagccggaaccccagcagaagccggaaccagaaccaaat

SEQ ID NO: 558158 - DNA, 201 bp, Homo sapiens
gggtcagatcctcgggaagccgagccatcccatccagccgcttgccccaaaccgggcgcaggccgtggtcacttctctaggaagctccgaagatcccgccwctccgtccctcaaaggtgcggaaagccggcttcccccagccctcggagaagattcctgactctccgctcggtcggggcatctgagggcaggagctgcgcc

SEQ ID NO: 558159 - DNA, 201 bp, Homo sapiens
gctcagaccattacagctgcttcgcatcctggctccagctcctgattcccaaggcctgttcctctccccagcccaaccccagtgaccctggcatccagagkggggtgggtcatggagccagggtggggaaagaggtgggccagaactactagagaccttgatggatggtttccagccccagagatttcaggcatttcacca

SEQ ID NO: 558160 - DNA, 201 bp, Homo sapiens
cactcctggcccggacagctccctggttgggtagggggtggggccggacctcagccggacgtcttagacgtgcttgtttcagatcctgaggacggcattcytacccctcccccattcccagctgcagccccctaaacccaggaggcgccctggcccgcgctcgccccccagggcctcatgtcggaaccacagcctgacctg

SEQ ID NO: 558161 - DNA, 201 bp, Homo sapiens
ccctgagccgcactaggacgcccctggagccggaaccccagcagaagccggaaccagaaccaaatcaccggtaccgggtcggccaggtggtcagggtgggmgaaaccaaaaagggagaggggtgcgggagtactgagaggaaggggctgcagaggcctggctcaggccggcgtggaggaggtgcgggcgctgactcaggca

SEQ ID NO: 558162 - DNA, 201 bp, Homo sapiens
tccttcagctgaggacgatgacatgaatgaggacacagtagagaggattgttcgctgcatcatccagaatgaaggtgggtctagcatagccccttgctccstcttctccaaccttctcttgccctgacctccacctccactgactccctcttttccttcttccctcagccaatgctgaggccttgaaggagatgctggggg

SEQ ID NO: 558163 - DNA, 201 bp, Homo sapiens
cccctcctccctgctgtccagtgtggatgccacctccagcctgcaggacggagccccctcccatcatcacacagtgcacctgggctctgcagccccttgcmtccattgcagccgcagcaagaggcctccacttgtccgtcagggacgctccaaggaaggaaaaagccgcccccggacaggggagaccactgtgttctctgt

SEQ ID NO: 558164 - DNA, 201 bp, Homo sapiens
cggagggaggggcccaagcccagggctgcccactcaagaggcaaatgggcagccaagcaaaccagacacttctgatcaccaggtaggaaaacacagccggsactgcactgggctgggctcttattgctctctactctggggggcactgataggacctactcctggtctctcattgttgacccctcccctttctctcaggtg

SEQ ID NO: 558165 - DNA, 201 bp, Homo sapiens
gggagtatgtgaggtgagtctgcctgagccctaaatgaggtaatctcatcttcccatcacctacttaaactatttaagcctttcggctccctgaacccccmgagtaaactgcaggcttagcctttgctataaatcccttggtttggtggtggaggtagggaaggtcctggagccccaggggaaaagctggacacagcttga

SEQ ID NO: 558166 - DNA, 201 bp, Homo sapiens
tcccaaggcctgttcctctccccagcccaaccccagtgaccctggcatccagagtggggtgggtcatggagccagggtggggaaagaggtgggccagaacyactagagaccttgatggatggtttccagccccagagatttcaggcatttcaccaccctagatagggtcatgacagaagagaaggtagttccggtcctaga

SEQ ID NO: 558167 - DNA, 201 bp, Homo sapiens
gcatcctggctccagctcctgattcccaaggcctgttcctctccccagcccaaccccagtgaccctggcatccagagtggggtgggtcatggagccagggkggggaaagaggtgggccagaactactagagaccttgatggatggtttccagccccagagatttcaggcatttcaccaccctagatagggtcatgacagaa

SEQ ID NO: 558168 - DNA, 201 bp, Homo sapiens
gaccattacagctgcttcgcatcctggctccagctcctgattcccaaggcctgttcctctccccagcccaaccccagtgaccctggcatccagagtggggkgggtcatggagccagggtggggaaagaggtgggccagaactactagagaccttgatggatggtttccagccccagagatttcaggcatttcaccacccta

SEQ ID NO: 558169 - DNA, 201 bp, Homo sapiens
gggtttcaccatgttggtgaggctgatctcaaactcttggcttcaggtgatctgcccgcctcagcctcccaaagtactgggattacaggcatgagccaccrcgccctgcctgatattattcctcttaatgcttgagcctgagccatatttagttcagtcctgtattttgttcctgatgttagttacttatgcctgatttct

SEQ ID NO: 558170 - DNA, 201 bp, Homo sapiens
gggttcaagcaattcttctgcctcagcttcccaggtagctggggttacaggcgtgtgccatgacacccagctaatttttgtatctttagtagagacagggktttttcaccgtgttggctaggctggtcttgaactcctaaccttaagtgataggcccgcgtcagcctcccaaagtgctgggattacaggtgtgagccacca

SEQ ID NO: 558171 - DNA, 201 bp, Homo sapiens
gcactttctctgttggcagcttgtttgcccaaaccatgtgtgctttatagtgcaaggactggcagtttgtatggatggacttggaggaatgcagcatcctyagcccggtttctacctgttctgctgtgctggaatagtgataccagcgtggcctttcctccttccctctgggctatcaactacctaggatgccggctgcca

SEQ ID NO: 558172 - DNA, 201 bp, Homo sapiens
gattttcagtccttaccaattttaatacatcgatctttttagactttcagaaattagattttaaaaggcgtgactcttcagctggatctcaaggatgtatragaaaattatgggctcagataggtaatgccattgttgaaacaatctgagtctatctttgggccctgttgtttcttctaaatgttctttaatacagtacga

SEQ ID NO: 558173 - DNA, 201 bp, Homo sapiens
aagattaggactagaggtactagtcaagtgaacacttgttgggagtcttaccttttaattacttagcttctcttgggttttgagtagggtcagactactascacaaagaaattgggaagttctataatatcaagataatagtcccttgtgatttaaaaatataaatctatccctattatctggggtttccagaacttcttc

SEQ ID NO: 558174 - DNA, 201 bp, Homo sapiens
gttttgggagtgcagtttttgtctgtgaacattctcatacaactttttgggctggacatatgtcttcatttctcttgggtaagtacccatgagtggaatgrctgggtcatttggtagatctatgcttaattgagaaattgccaaactgttttcaaactgttttccaaactgttttcattttacattcttaccagcaatgtg

SEQ ID NO: 558175 - DNA, 201 bp, Homo sapiens
aatactgttttgcccatgcccttgaagttcaaaatctaggtgggatgagaaatatccacacttattaaataacagaggctttaaaaagatcaagataataygtatgcaatgtcacaaaacattgaataattaattgttggatgagatatagataacaaataccatgaaaataagtttatcaaagcagagagtgagtatcat

SEQ ID NO: 558176 - DNA, 201 bp, Homo sapiens
ccagttttgggagtgcagtttttgtctgtgaacattctcatacaactttttgggctggacatatgtcttcatttctcttgggtaagtacccatgagtggartgactgggtcatttggtagatctatgcttaattgagaaattgccaaactgttttcaaactgttttccaaactgttttcattttacattcttaccagcaat

SEQ ID NO: 558177 - DNA, 201 bp, Homo sapiens
aagctgtatatggtaatatgttccatatccctcctagtttctggtagcttgttggcaatccttggcactccttatcttgtagatgcatcatcctgatctckgcctatgtgatcacatggtgttctccctctgtatgtatccatatccaaatttcctctttttataaggacactggtcatattggattaaggaccctttcta

SEQ ID NO: 558178 - DNA, 201 bp, Homo sapiens
tttggtgagcaagggatacttgctgactgaatcttttgtgggcatttctcactttcccctgggttcctgttggctggtagtaggtatacaatgcccatgtrttccttcctcctcttccctgccccagcaagcagtcaaggagaaccagaagcggcgggagacagaagaaaagatgaggcgagcaaaactagccaaggagaa

SEQ ID NO: 558179 - DNA, 201 bp, Homo sapiens
gttgtctactcatgtttaagaatgagggattacaaagcagattggaaactctaggtgcgtgggtaggatttgaaagctggttgctttgctgtaggacagcrccatccaatagaaatctaatgtgaatcacattgtaagtttagattttctagttttagaaacgtgaaattaatatatctaaaatattacttcaatatgaat

SEQ ID NO: 558180 - DNA, 201 bp, Homo sapiens
ttgccaaatgtaacctatctcaaggcatcagaatattctttcttcctcttgctccttttatgagaactctgtggaaatgagagatgaggaggagcattgcmatccacttctctttgtgtctgtgtatgtatacgtgggtgggtggagtgggcgagattgctggtgtgcttttgatacccgtggcttagttttcttgaacta

SEQ ID NO: 558181 - DNA, 201 bp, Homo sapiens
atgaggcgagcaaaactagccaaggagaaggcagagaaggagcggctagagaagcagcagaagagagagcaactcatagacatgaatgcaggtgaggagtraagacgggttgatgggctgagataggaatgttgggaagacttctctgcctagagtctagaggcagagtctcatgtctgagctcacctcctggcaaatgat

SEQ ID NO: 558182 - DNA, 201 bp, Homo sapiens
gctcacgcctataaatcccagcactttgggaggccgaggtgggcagatcgcttgaggtcaggagttccagaccagcctggccaacatggtgaaaccccatrctaaaaatacaaaaattagccacgtgtggtggcatgcgcctgtaatcccagctactcgggaggcttgaacctggaagaaggttgcagtgagctgagatca

SEQ ID NO: 558183 - DNA, 201 bp, Homo sapiens
ggagaaggcagagaaggagcggctagagaagcagcagaagagagagcaactcatagacatgaatgcaggtgaggagtgaagacgggttgatgggctgagayaggaatgttgggaagacttctctgcctagagtctagaggcagagtctcatgtctgagctcacctcctggcaaatgatttttggcagtcttcactccgaga

SEQ ID NO: 558184 - DNA, 201 bp, Homo sapiens
gtgccagatatttctatttttcaaaagaagtcagcaatccgtaattttaaaaaaataataaatcttgaataacataaaatatcctagtcactatttgaatwtccccaattaggtcatttttttaaaaaccagtttgttcaaatcacaattccaaatatagtccactgtactggtattctcaattttcatttaaactatagg

SEQ ID NO: 558185 - DNA, 201 bp, Homo sapiens
aagtcacagaaacttcagattaattttgctgcttgcagaagaaacagaatacatccccccatccatatttttctcaattcaaataacattctggaattatyagggctaaatttgtgcacaccaaggtactaggcttggacacatggttgttatatatgtagaaagatcaagcagagcctttccccaaacatacatcagatt

SEQ ID NO: 558186 - DNA, 201 bp, Homo sapiens
gccatcaaaatcagtgtaaacttcctagaatgtgatagcttagcttactaagatgtagaactggcttttagagatgtttggactgacagagggagtaattkagttacctgttaatattttcagtaagtgactttgaggcagttacctcttattttctgtctactgcctgatcttcaagccaagtacttactaggaatcctc

SEQ ID NO: 558187 - DNA, 201 bp, Homo sapiens
ctcttcttcttttcagatcaaatgattgataagacaaaggtggagaaatctgaagccaaagctgcagagctggaaaagaaggtgcatatgagagaccaaaracatgtgtttgagtatatctttctttgagaattattattttcctgatctatgagacagttttcctctgtggtattttggaagcgtttagcacccaatagt

SEQ ID NO: 558188 - DNA, 201 bp, Homo sapiens
ttaaactattaccttttctctcctttgctcgctcttgcattctctctcattcccctgtgattgtggtattgctgtgatatatactgttttccttctgtccrtccaaaggttcctctggcctgttctcattccctccactaaatctttcgggtttttttctgtaaaatattttcctgacgctcctcccatcttttaattgtg

SEQ ID NO: 558189 - DNA, 201 bp, Homo sapiens
taatggtgtgaacttaggtagtgctagtagacatggatggaagagagacgaatcaagagtctgtaggcagaaagaacaggttgctggttaccccccaccctttttttttttttaaacttaagcttcagctgtgaacaattcagctgccattaattctttagacgcaggttctgttatctacattacatctatcttagagtt

SEQ ID NO: 558190 - DNA, 201 bp, Homo sapiens
attgtgtaatgccagtcttcctgtttctaaatattaatgaatgtttagcatctttatagataaggaaaattaattcattccagactaggatagggaataayaacagtagcagtaataaaagcagttgtttgttgcatacttaactgtatccctagtgcagtgctaaagagccttagatttattatctcattaatctctaca

SEQ ID NO: 558191 - DNA, 201 bp, Homo sapiens
ttccacatgttcactttgggatataaattgtcacctgtggtcaacagagaacatttctgatactctgaggatttcgggactttcattccatttatcgtggragcatttttttcttgttaggtggtggtgttagcaaccttttgttttcctgtattcagtatactacagattgtgtaatgccagtcttcctgtttctaaata

SEQ ID NO: 558192 - DNA, 201 bp, Homo sapiens
gcattcaccagtatctcaacattgttcccttttcccacacagcctgtgggactgttctcttgtagtcaaaatatttatctggttctatggctacttttcartagtctaataacaagtgagtaagttgggggaagcatggggaggtcagtttttcttgactgttcaacctgctgagcataatggtgagtgagtggaaagctg

SEQ ID NO: 558193 - DNA, 201 bp, Homo sapiens
atggacagtcttctagaagccctgcagtcaggggcagcattccgacggaagagagggccccgtcaaggtaagtaagcacatggagctcatcctgggtgtcraagggggtgagggctctctactcctgccagtctgcggctaaagagcaaataatgatgctctaagcatctttttagtccctgcatccagaacggattatct

SEQ ID NO: 558194 - DNA, 201 bp, Homo sapiens
atacaagtaaacatgagcgtgtgagacttaaggctgagctctctttgcctcttcttagctgccagctgctgtgggagaggggaaatcaagcaatagccatkcattttgtgtggggcttgatatttgccatgctgctctggctgaagagttcacatctccatcttgttctttataacagagggcgatgagacaggtgtgatg

SEQ ID NO: 558195 - DNA, 201 bp, Homo sapiens
acaggaaggccgggtgtgcagtcacatctctgctagcttcggagctgaccaaggatgatgccatggctgctgttcctgccaaggtgtccaagaacagtgaracattccccacaatccttgaggaagccaaggagttggttggccgtgcaagctaatgtgggtcctgtgaccgcggcagctcctcagcggagccgcagactg

SEQ ID NO: 558196 - DNA, 201 bp, Homo sapiens
ccagctaatttttgtatctttagtagagacagggttttttcaccgtgttggctaggctggtcttgaactcctaaccttaagtgataggcccgcgtcagccycccaaagtgctgggattacaggtgtgagccaccatgcctggctcacatcccttaagtcttgataggaagtgtattcgtttgctagggctgccgtaagaga

SEQ ID NO: 558197 - DNA, 201 bp, Homo sapiens
aggcaggtggatcacctgaagtcaggagttcgagaccagcctggccaacatggtgaaaccccgtctctactaaaaatacaaaaattagccaggcatggtgrtgggttcccgtaatcccagttactcgggacgctgaggcaggagaatcacctgaacccaggaggcggaggttgcatggtggtgggtacctataatcccagt

SEQ ID NO: 558198 - DNA, 201 bp, Homo sapiens
gtcacaggggacttggctatttgctctgaaggagaaagtagcagttaaatgtaaagttgtgggctaggggaatgtactgttagccaagaaggggtttatcrtagtggtggctagaggatgaatgatgattatagatacaggaaagggaggaggaacttaaatttcatgttggataagttcaatacataccacagaatatta

SEQ ID NO: 558199 - DNA, 201 bp, Homo sapiens
ttgggaggccgaggcgggcagatcacgaggtcaggagattgataccatcctggctaacacagtgaaaccctgtctctactaaaaatacaaaaaattagccragtgtggtggtgggtgcctgtaatcccagctactcaggaggctgaggcaggagaatggcgtgaacccaggaggcggagcttgcagtgagccaagattgcg

SEQ ID NO: 558200 - DNA, 201 bp, Homo sapiens
ggagaaagtagcagttaaatgtaaagttgtgggctaggggaatgtactgttagccaagaaggggtttatcatagtggtggctagaggatgaatgatgattrtagatacaggaaagggaggaggaacttaaatttcatgttggataagttcaatacataccacagaatattagtctcccagcactggttctttttcaatctg

SEQ ID NO: 558201 - DNA, 201 bp, Homo sapiens
aagtgtggtggtgggtgcctgtaatcccagctactcaggaggctgaggcaggagaatggcgtgaacccaggaggcggagcttgcagtgagccaagattgcrccactgcactccagcctgggtgacagagcgagactctgtctcaaaaaaaaaaaaacaaaaaaacagccaggcatggtggctcatgcctgtagtctcagct

SEQ ID NO: 558202 - DNA, 201 bp, Homo sapiens
gtagcagttaaatgtaaagttgtgggctaggggaatgtactgttagccaagaaggggtttatcatagtggtggctagaggatgaatgatgattatagatayaggaaagggaggaggaacttaaatttcatgttggataagttcaatacataccacagaatattagtctcccagcactggttctttttcaatctggaaataa

SEQ ID NO: 558203 - DNA, 201 bp, Homo sapiens
tgtcaaccttactgaatgattaattcttgtagttcttccttgggttgtcttgaattgctatatatagtcatatcttccacaaaaatgacattttcatcccttttttttttttttttttttttttttgagacggagttttgctctttttgcccaggctgcagtgcaatggcgcgatctcagctcaccacaacctctgcctcc

SEQ ID NO: 558204 - DNA, 201 bp, Homo sapiens
caccacgcctggctagtttttgtattttttgtggagatgaggtttccccatgttgcctaggctggtctcaaactctggggctcaagcgatccgcccacctyggcctcccgaagtgctgggattacaggcatgagccactgtgcctggcctaaaagagccctgttaggaagattatccagcataggtttgcaggatgggttg

SEQ ID NO: 558205 - DNA, 201 bp, Homo sapiens
taaaattatttcattttgcatggggcctagagggatatttttagttttcttagtttttgtgaaagatgtgtgtcaggcttagaggtctctagtgatttctytcttgattcttgtatttttaaaagatgggagttggtcttagttggcagctctttgcatccgccagggctgttcgttacttacttctaggtctgtgggtga

SEQ ID NO: 558206 - DNA, 201 bp, Homo sapiens; identical to SEQ ID NO: 408723

SEQ ID NO: 558207 - DNA, 201 bp, Homo sapiens
cccacctcctcccttgcctggagaagcaggaatgccacctcctcctccccctcttcctggtggtcctggaatccctccacctcctccatttcccggaggcmctggcattcctccacctccacccggaatgggtatgcctccacctcccccatttggatttggagttcctgcagccccagttctgccatttggattaacccc

SEQ ID NO: 558208 - DNA, 201 bp, Homo sapiens
catctacagtctattaaaatgaactggattctcctagagttcagttggcaggaaaaaagtactaggcttagatgtaaaaagcgtagtggctaaatgcctgtttttttttttttttttttgcatttagtaatttagactttgaagccattggaagaatcttaattaaaccttttttaggcatgaaaaaatagctattacagt

SEQ ID NO: 558209 - DNA, 201 bp, Homo sapiens
tggtagaggctaggtttcaccatgttggacaggttggtctcgaacttctgacctcaggtgatccacctgcctcggcctcccgaagtgctgggattacaggygtgagccactccgcccagccaaaccttgattttaaggtcagaatcatggtgcttttttcccccgagcatggcctggatttatgagctctgtaaatcaagt

SEQ ID NO: 558210 - DNA, 201 bp, Homo sapiens
aattaggaggacactgaggcctagtggtattaagttgctcaaagtcgtgtaattagatgacctaggttttagactccactaatattcttctcagtattctytctcacattgcattgtcatacctaaactttgtaactgtgccttgtcaggagtgtttccttaagcaaaataccactggagaagagtaaatactgataggca

SEQ ID NO: 558211 - DNA, 201 bp, Homo sapiens
ttggtctggctgctctcgaactcctgaccttgtgatccgcccaccttggcctcccagagtgctgggattacagacgtgagccaccacacctggcctacatrggccatatttgcatgcacagtattgttcccatgatgtgtttgagatgcctgtgattctgagtgagttagcctttttcttctagaaaccaagttaatataa

SEQ ID NO: 558212 - DNA, 201 bp, Homo sapiens
tttttaaggtccatccttgatgcagaaagcattgtgtgtggttttctttcaataatacaaaataaatctttcatttatattgagtccatttttcttagagaaaaaaagtgtgtatatgtctatagagatttatactaaaatgttaactatacttatctttgaggaattttcatcagctgtaatagcttaaatttctaggga

SEQ ID NO: 558213 - DNA, 201 bp, Homo sapiens
gagtcttgctctgttgcccagactggagtgcagtggcaagctctcagttcactgtagcctctgcctcctggtcacaagcaattctcctgcctcagcctccygagtagctgggattacaggtgtgcaccaccacacctggctaatttttgtatttttagtagagacagggtttcaccatgttggccaggctgctctcgaact

SEQ ID NO: 558214 - DNA, 201 bp, Homo sapiens
tttaagcgcataatagaacctacccacattatatatggataactagcttgagataacatactgaatccatttcttcagggaattcccctggtctaacttgratagaatatgctggtgcagaaagattttcacggtcaaagtcaaccctttgtgtcatatgttaactcctaattatccccagctagtctcatttttagagcc

SEQ ID NO: 558215 - DNA, 201 bp, Homo sapiens
tagtttccaggatgtcaggcaactccccactcctccatttcctgtttgtggtcttcattgagagacgccttaaacaggaattcctggggaagtgcaggctrtagcggtgggattccgggggtcattagtccattattgaagctggggaatcatgtactataaaaggacctcccttccgttctgttgtctcctagaaactat

SEQ ID NO: 558216 - DNA, 201 bp, Homo sapiens
gtcccccagatttaaaatgttgagctagccaagtgaaacattttatctttgggtttgacttagcttgagggccaccattttgtaacttctgtgttcagttwatctgcaagaggaaaaatgcatctggctggcagtggtggctcacacctgtaatcccagcactttgggaggccgaggtgggtggatcacgaggtcagcagt

SEQ ID NO: 558217 - DNA, 201 bp, Homo sapiens
ggaggtgagctgagattgtgccactgcactccagcctgggcaatagagtgaggctctgtcttgaaaaaaaaagaaaagaaagaacagggaaaggagattcrtttgggcttttattgtggttaggggcttgggctggggtgagagttcttacacaagagcggactttacctagtttggatttcttgctgattcccaaggaag

SEQ ID NO: 558218 - DNA, 201 bp, Homo sapiens
caggagtcagcaaactacggccaacatgttttgttaataaggttttattggaacacagccattctattgtcattgtcaatgactattttcatattatgccrgcagagttgagtagttgcaacagaaactattaatatatggtccacaaagcctaaaatatatgtctgtttatggaatttcttttatttctttatttgctta

SEQ ID NO: 558219 - DNA, 201 bp, Homo sapiens
aaattagctgggcgtgtggcaggcgcctgtagtcccagctacttgggaggctcagacagaagaatcgcttgaacccgggaggcgtaggttgcagtgagccragattgtgccacttcattctagcctgggcgatatagcgagactccgtctaaaaaaaaaaaaaattagccaggcatggtgtcatgtgcctgtaatcccagc

SEQ ID NO: 558220 - DNA, 201 bp, Homo sapiens
tacagagtcagtatggtaagttagataggaggaagactgatttcttcttttcatgtcagaagagtcttgaactgcttgtgaaccagaggaaccatgcctgygtaagaggttaaaggggtaaagaatttgatgtgtggcttgttatgtaagtgaaaatggatcactgctaatgcttttttctgtttctcagctggagagatt

SEQ ID NO: 558221 - DNA, 201 bp, Homo sapiens
tgtgccacttcattctagcctgggcgatatagcgagactccgtctaaaaaaaaaaaaaattagccaggcatggtgtcatgtgcctgtaatcccagctactygagaaggaggctgagacaggaggattgcttgaacccaggaggcggaggttgcagtgggctgagatcatgtcactgcgctctagcctgggtgacagagcaa

SEQ ID NO: 558222 - DNA, 201 bp, Homo sapiens
ttctctttgaacagatgctggtaagtttcccattcccaaaatgttgcttcttcctgtgcatttatggacatggtgggctctttttggtgcataattcccarctagccctttattacaaagaattccaggcttaacatggaactttttaatattaaccctttaatcccataattagggactaaatatacaaataccagttca

SEQ ID NO: 558223 - DNA, 201 bp, Homo sapiens
gtgagtcctgggacaggtacccatgacatgggagactgtgcccttgtcttggacctgttttttttttgccaattttatgtaacattttatgtctgcatcarttctgtttcattccattatataagcctgttcactttttactgtcttatttagttaccgttcttacatacattttgcctggttaaattttcatgaagtatg

SEQ ID NO: 558224 - DNA, 201 bp, Homo sapiens
ctaaaatttactcatctgctagatggggctgttgttcctaagaaccttgtttgcaagattaaaaatgggaaaggggtagagaataaagggacctcactgaytatgtcttctatatacaggagttacgatagccggaacaagcatgagatcattcgctgcttgaaagcttttatgaacaacaaggtgagatttttcccattc

SEQ ID NO: 558225 - DNA, 201 bp, Homo sapiens
agaatatgctggtgcagaaagattttcacggtcaaagtcaaccctttgtgtcatatgttaactcctaattatccccagctagtctcatttttagagcctcyttctagccatcccagctttagtgtgtgcctgtattactcttttctagaaacatatagactgaaatggtatcttttaagtccaaggtaccatctgccatta

SEQ ID NO: 558226 - DNA, 201 bp, Homo sapiens
tatcctactgtattggccttgaagatacaatttgtttagtcaggtttgctgagatataatttatatatagtaaaattcaccctttttatgtgtacagtatyatatggctgacaaatgtatacggccatataatcacagtcactccaaaaagttccttcatgttcatttgtcagtcctcctccttattgccaaaccctggca

SEQ ID NO: 558227 - DNA, 201 bp, Homo sapiens
ttcatctttaaagtatacaatcccattttttgtgtgtgtacagatgctccttgacttacaatagaattatgtcctgaaagccattgtgagtcgaaaatatygttaagttggaatgcatttaataacacctaacttaccaaacatctttcttagcctagcctaccttaaacatgctcgggacacttatattagcttacaatt

SEQ ID NO: 558228 - DNA, 201 bp, Homo sapiens
ggcacagtcatggctcactgcagcctcaacctcctgggctccagtgatcctcctacttcagcctcctaagtagctgggactacaggcatgtgccaccatgcccagctaaatttttttttaaatggagacagggtctcactatgttgcccaagcttgtctcaaacacctggactcaagtgaccctcccacctaggcctccta

SEQ ID NO: 558229 - DNA, 201 bp, Homo sapiens
tagaaaggcaggtgtttttagtctaggttaatagttcttttcattaagaaaacatagactacattaacaaaaattaggcctcactgtcctggaactagacmaagaaaaagcagcattcactggaaattggaacagatttctgcccccgcctctatatttctatgtatatctccttcctcccaaaccctgttctctaaaata

SEQ ID NO: 558230 - DNA, 201 bp, Homo sapiens
aaagcccacaccaagtatccttcaccttcccctgggactccagggtttgtccccaggtactggctaggatgcagtgggggaaggtggagtcccgctgacaygtgggatgagggctgcacacggtcaacaggtggcgtaatggaccttgcccagtttccagtacccgggtcaagcaaatgagggtggaatgtaggtcagctg

SEQ ID NO: 558231 - DNA, 201 bp, Homo sapiens
tataggttcttacaacattatttcctactgaccacacaaggtgatgtggccttaacattaagcatttctagccttacaaaaatacattgcatcttattgtkttttttttttttttttttgaccccgtcggctaagtgcctgcatcagaattttggtggggaattcccttttaagcctcttcctgtggaactatactagaat

SEQ ID NO: 558232 - DNA, 201 bp, Homo sapiens
agatggggtctcactttgttgcccaggctgcatagttcctgagagcattccattgttgtggagtagaagcacaccatgcagatcaaccataaaagtcccascaactcccctgcctgtaccccgtctccactacacacgctcacacatgcttccctctctttcccctccccagaggtaaccactgccactggactttattct

SEQ ID NO: 558233 - DNA, 201 bp, Homo sapiens
gccttaacattaagcatttctagccttacaaaaatacattgcatcttattgttttttttttttttttttttgaccccgtcggctaagtgcctgcatcagamttttggtggggaattcccttttaagcctcttcctgtggaactatactagaatcccagatgcttcctgtccacaggtagccagacatcagtggcttccctc

SEQ ID NO: 558234 - DNA, 201 bp, Homo sapiens
atattttcctgacgctcctcccatcttttaattgtggcgtgtcttccctttctgcttatttcacaaagtactatgtccctagtaccttagcacagttgtaygcacaattagattttaaatggattgaacttttggagcgggtggggagccggtcaccctcttctttcttcagcagaatctctgtttcactaccagaagcat

SEQ ID NO: 558235 - DNA, 201 bp, Homo sapiens
ttccaatcaaggggggagaaggtgtatcacaaggcggaagtgggagctagagagatgccaggctcttttaaacaaccagtgcttgtatgagctcattactrtggggagggcaccaagccactcataagggatccaccccatgacccaagtgcctcccactaggccccacctccaacattgtagtccacatttcagcatgag

SEQ ID NO: 558236 - DNA, 201 bp, Homo sapiens
tactggccctctgtttcctgtctctgcttctttcttgctgcagattccctaccccttcgcccccactgctctctctgtgggcagcggaaatacagcatacrctgctcacacagcactgagcccatgccaccctcctctaaacctgaggggccacaaaccttctgcaaatgaagaggtgttcacagagctgctgagtttgtt

SEQ ID NO: 558237 - DNA, 201 bp, Homo sapiens
ccatatcacctcctatctagagaaggttgctaagaatatttcctgtaccactgcttattctcccccctacttttgtaaataggacaagaaacataattagsagagtttgagacaagaatgagttatttagtgtgatgatgattgccccatctgtcctagtttcctcttccctaaggaagcttaatgtattaacaagagcac

SEQ ID NO: 558238 - DNA, 201 bp, Homo sapiens
agggctgcacacggtcaacaggtggcgtaatggaccttgcccagtttccagtacccgggtcaagcaaatgagggtggaatgtaggtcagctgcactggtgrtgctcagccagcaggtggcgctgggagcagtgagccccagccttggatctggcagcctatggactttttgggatttcacagtttcagatttcactatcct

SEQ ID NO: 558239 - DNA, 201 bp, Homo sapiens
gccagatatggtggcacatgcttatagtcccagctactagggaggctgaggtgggtggatcacttgagcctgggaggttgaggctacggtgagctgtgatygcgctgctgcactccagcctgggcgactgagattccatcaaaaaaaaaaaaaaaagacgggctatctgatcctgtttggcttctgcctacctaaagcttt

SEQ ID NO: 558240 - DNA, 201 bp, Homo sapiens
ctgcccctcatgtggagttgacctgcactatcgtgtctagtgaaggtcttttgaggctaggagtggtggcttctttactaatttgaagagtgggaattacwaaaaaaggcatcattagaggtttctacttcagagggacttaaatctatgttccctgtttcctggctgttgcattgtgtaggcccatttgatagttatact

SEQ ID NO: 558241 - DNA, 201 bp, Homo sapiens
tgctgagcataatggtgagtgagtggaaagctgggagacctgttccaacaagagctttctcatcccctgaccttaggccaaatcacaccctccctggtgtrtaggctttcaaggcttaaaagggaaattttgatcttctccctacctactctctgctcctggttcttatgaagtttgtaatacatcagaagcttcttgagt

SEQ ID NO: 558242 - DNA, 201 bp, Homo sapiens
  misc_feature (1)...(201): n = A,T,C or G
atatataattaaaatacaataaactgcatatttattcatgaaaccatttctatagtcaagataatgaatatagcagtcaccttcaagtttcctccttctcnctttgttatccctccctctcacccatcctcgtcctcccatctccagattaccactaattttctttctgtaactatagattagtttgtgttttctagaatt

SEQ ID NO: 558243 - DNA, 201 bp, Homo sapiens; identical to SEQ ID NO: 408718

SEQ ID NO: 558244 - DNA, 201 bp, Homo sapiens
gtagttcttttttttttttttctgtgtctaagattttatttttattttatttttattttttatttttatttattatactttaagttctagggtgtatgtgyacaacgtgcaggtttgttacatatgtatacatgtgccatgttggtgtgctgcacccgttaacttgtaatttacattaggtgtatctcctaatgctatccc

SEQ ID NO: 558245 - DNA, 201 bp, Homo sapiens
atcctgaatgttccactggtcatcagaggtatagcaaaatgtctcctatatctccattaatatctgtattgtctaggatgagggtttctttttactattctttttttttttaattcagaagtggcacaatgttatttttaaaactcaaacgatatagaagtatataaagtaaaatttaactgcctcatccctttgccaaat

SEQ ID NO: 558246 - DNA, 201 bp, Homo sapiens
gtgcacgggtcagaataattttatttcctgtgtcttagaatcaccttttgttattccccaaggcccttggtattttataaatgtattgccaggctattctyagggagtgttatatatcttccatgaaatgtaatagagatttaaaagataagttgtatgtcacatatgatttagaagaacaggttaaaataatttttattg

SEQ ID NO: 558247 - DNA, 201 bp, Homo sapiens
ggattgaacttttggagcgggtggggagccggtcaccctcttctttcttcagcagaatctctgtttcactaccagaagcatgtctttgttgaaacatatgrtttcaattactggccctctgtttcctgtctctgcttctttcttgctgcagattccctaccccttcgcccccactgctctctctgtgggcagcggaaatac

SEQ ID NO: 558248 - DNA, 201 bp, Homo sapiens
ttgaaacaaactttgtattacttaagtggttttcttttttcattgagcctccttttctcaattacctttgtttgaaagcagtaggcaaaaaattcattttrtgctaccagcaaagcattggatgtttgcccctccttggggttaggtgagacaaagccacactctccccttgcctggctgcctgtcacctcctccctgtgt

SEQ ID NO: 558249 - DNA, 201 bp, Homo sapiens
ccagtctgcaaactactgataattgtgctgatcccaaagtcatggatttatgaatccactctcctatcccaattccgcaggatgtgagttacacaggccatttttttttttttttttgagttggagtcttgctctgttgcccaggctggagtgcagtggcataatctctgctcactgcaacctcagcctcctgagtagcta

SEQ ID NO: 558250 - DNA, 201 bp, Homo sapiens
ccacagagaaacaggacctggaagcagaggtgtcccagctcacaggagaggtaatgcctgagcagggaaggcagaatgacctgtaacctcaggatgcacakggcttggaacaggagtcagtcatctcgctcctagggagggttcagctactaataggtaatctagttacatggtgcatattttaaaaataatatactggtt

SEQ ID NO: 558251 - DNA, 201 bp, Homo sapiens
tggggtggggaggatggcattgcgggaaaatatcccaaggtctgcattggataataggcaatgagatcttttgttttaaccattttttagcagatacaagyaaacatgagcgtgtgagacttaaggctgagctctctttgcctcttcttagctgccagctgctgtgggagaggggaaatcaagcaatagccattcattttg

SEQ ID NO: 558252 - DNA, 201 bp, Homo sapiens
aaatcaagcaatagccattcattttgtgtggggcttgatatttgccatgctgctctggctgaagagttcacatctccatcttgttctttataacagagggygatgagacaggtgtgatggacagtcttctagaagccctgcagtcaggggcagcattccgacggaagagagggccccgtcaaggtaagtaagcacatggag

SEQ ID NO: 558253 - DNA, 201 bp, Homo sapiens
ccatgtttccataatagtatttatagaaaacctccttttaggtcaagagatggagaccatcctggtcagcatggtgaaaccccatctctactaaaaatacaaaaaaaatcagctgggcgtgatggtgcgcgcctgtagttccagctacttgggaggctgaggcaggagaattgcttgaacccaggaggtggaggttgcaat

SEQ ID NO: 558254 - DNA, 201 bp, Homo sapiens
ttattagtaagctcttgctgtctgtttttatggtttttttttttttttttttttttagtttctgctgaaaacttgcaaaagaacctagatcagatgaagamacaaatttctgatgtggaacgtgatgttcagaatttcccagctgccacagatgaaaaagacaagtttgttgaaaaaatgaccatatcctctcttgaaagg

SEQ ID NO: 558255 - DNA, 201 bp, Homo sapiens
aggtatagagatttccaatatatcgctgcccacacacgtgcatggtgtatcaatccgttctcacactgctatgaagaaatacctgagactgggtaatttayaaaggaaagaggtttaattgactcacagttctgcattgctgggaaggcctcaggaaacttacaatcatgatggaaggcaaaggagaagcaggcaccttct

SEQ ID NO: 558256 - DNA, 201 bp, Homo sapiens
aaaacttaagtatgtgacacaactaaagtacataaggaactaaaattattaagtaccagaatgtgtgtatagactgaagctatgctctgaaaggtgaaacyaaggggtgttgaggctgggattattagtaagctcttgctgtctgtttttatggtttttttttttttttttttttttagtttctgctgaaaacttgcaaaa

SEQ ID NO: 558257 - DNA, 201 bp, Homo sapiens
gtttcactggaaagatgaaaacttaagtatgtgacacaactaaagtacataaggaactaaaattattaagtaccagaatgtgtgtatagactgaagctatrctctgaaaggtgaaactaaggggtgttgaggctgggattattagtaagctcttgctgtctgtttttatggtttttttttttttttttttttttagtttct

SEQ ID NO: 558258 - DNA, 201 bp, Homo sapiens
atagagtaatgaaagaataaatatactgtttcggatgatgctcctaaacctgtagtgatgctaattttaaaatttatttattaaaatgtgggccacatcakttgaataagacatgattttgccctcatgcaatttagtctggttcacagaaaaagttacaacaaatgatctgttaagaaggttctaatatagtcccggtgc

SEQ ID NO: 558259 - DNA, 201 bp, Homo sapiens
gggttcaagcagttctcctgcctcagcctcccaagtagctgggattacaggtgcccaccaccatgcccggctaatttttgtatttttggtagaggctaggkttcaccatgttggacaggttggtctcgaacttctgacctcaggtgatccacctgcctcggcctcccgaagtgctgggattacaggtgtgagccactccgc

SEQ ID NO: 558260 - DNA, 201 bp, Homo sapiens
tttcttatctttttgctgtactttttggggaatttccttaattcttccagtccttttattgagttttcatttctgttcttgtattttaaacttctaatgasctctttttcctctgaatgtttgttgtggatattaatgatttttagaacatctttcttcttgttgcatactgtttatttggcaagttgcttcccccagccc

SEQ ID NO: 558261 - DNA, 201 bp, Homo sapiens
ccttctgttcctagtcgtgctcctgttccccctgcccctcctttacctggtgactctggcactattattccaccaccacctgctcctggggatagtaccaytcctcctcctcctcctcctcctcctcctcctccacctcctttgcctgggggtgtttgcatctcctcacccccttctttacctggaggtactgctatctct

SEQ ID NO: 558262 - DNA, 201 bp, Homo sapiens
tctggaattcatggtccattactggcaaaacctttttcactttgctctactggaaacctggttttctctcaataccactttcccttttgcttgcttatgtggttttgttttgttttgttttgttttgttttgttttgttttgtttttgagatggagtcttgctctgttgcccagactggagtgcagtggcaagctctcagt

SEQ ID NO: 558263 - DNA, 201 bp, Homo sapiens
ccctctcctagctggatatgaacctgaatgaggagaaacagcaacctttgagggagaaggacatcatcatcaagagggagatggtgtcccaatacttgtayacctccaaggctgtgagtcctgggacaggtacccatgacatgggagactgtgcccttgtcttggacctgttttttttttgccaattttatgtaacatttt

SEQ ID NO: 558264 - DNA, 201 bp, Homo sapiens
tggaattcatggtccattactggcaaaacctttttcactttgctctactggaaacctggttttctctcaataccactttcccttttgcttgcttatgtggttttgttttgttttgttttgttttgttttgttttgttttgtttttgagatggagtcttgctctgttgcccagactggagtgcagtggcaagctctcagttc

SEQ ID NO: 558265 - DNA, 201 bp, Homo sapiens
gttgtcttatttctttaatccaactcaaaggcatccctatggcagaggtcagagtgtataaggtgaaatgccgttctgtttttggaggggagtaggtaaayaggatgaagatgttagcaaacagaagtggcaatttaaaattctttctagtttcctggaagtatagatttagcaatagcactatccatcacaggaaggatc

SEQ ID NO: 558266 - DNA, 201 bp, Homo sapiens
ggaattcatggtccattactggcaaaacctttttcactttgctctactggaaacctggttttctctcaataccactttcccttttgcttgcttatgtggttttgttttgttttgttttgttttgttttgttttgttttgtttttgagatggagtcttgctctgttgcccagactggagtgcagtggcaagctctcagttca

SEQ ID NO: 558267 - DNA, 201 bp, Homo sapiens
cttggtccgaaatgactatgaggccaggtaagatgctgtgcttatgagaagttttgaatttgagcctaagtggagagagtgaattccttaaattcaaagaytgttctgtaaaaggaaaatgtaaagacaaagacccaagattagggttcattagtcaccgatataaaggaagttgtcttatttctttaatccaactcaaag

SEQ ID NO: 558268 - DNA, 201 bp, Homo sapiens
gaattcatggtccattactggcaaaacctttttcactttgctctactggaaacctggttttctctcaataccactttcccttttgcttgcttatgtggttttgttttgttttgttttgttttgttttgttttgttttgtttttgagatggagtcttgctctgttgcccagactggagtgcagtggcaagctctcagttcac

SEQ ID NO: 558269 - DNA, 201 bp, Homo sapiens
aattcatggtccattactggcaaaacctttttcactttgctctactggaaacctggttttctctcaataccactttcccttttgcttgcttatgtggttttgttttgttttgttttgttttgttttgttttgttttgtttttgagatggagtcttgctctgttgcccagactggagtgcagtggcaagctctcagttcact

SEQ ID NO: 558270 - DNA, 201 bp, Homo sapiens
gtatcagtatgcagagactttcctcattaaaaaaattataagtttttaataagcaggcattacttttataatgaacacaaggataaaacaaaagtagagtaatgaaataattgttcttttttttttttgaaacagtagctacagtaacccatttgatctgactgcatcttagcatgtatacatgtccttttgatcttccta

SEQ ID NO: 558271 - DNA, 201 bp, Homo sapiens
ttgctgtcacccagactggagagcagtgcatgatcatagttcactgcagcttcaactccctgggaagggatccccaaaccttagcctcctgagtagttggractacaggtgcacaccaccatacccagctaactttttttttttgtacagacaagatctcgctatgttgcccaggctggtctcaaactcctgacatcaagc

SEQ ID NO: 558272 - DNA, 201 bp, Homo sapiens
cctccacacttaccacatcctccttcaggcgccccgccacctggtcctcctcaaatgcacgggcctcagccttctcctcctctgtgcaggacagaccagaycaagtaaactgaggctgagacccctctttcccttccatcctgtccccatcccactgccccagggctggataatgcaggaagctccagctgcctcagcaga

SEQ ID NO: 558273 - DNA, 201 bp, Homo sapiens
gagagctggtgcccccgtaaaacgcgaatgtcagctgaggctggggcctggatctgggcagacaggggccaggtcactgtggctagtggcataaaggcacyaccttcaccaaccccactgcgtagtgttggcctttcccacccaggccagaaggaaaacaagacccaaggctacaacaaccagatccttacctgaccagat

SEQ ID NO: 558274 - DNA, 201 bp, Homo sapiens; identical to SEQ ID NO: 408796

SEQ ID NO: 558275 - DNA, 201 bp, Homo sapiens
gttcccgggttaagcgaacggctttctaggatttggcccgcggagagagggacgaagctgactccagcaggggtccagggcgaagggctggggaagggccsggacccaggtcccctggatgggatgacggttgtcccagtagcagggctgaccgcggccctcagaagcgccatgctcacctttcgccgccgcttgccggcc

SEQ ID NO: 558276 - DNA, 201 bp, Homo sapiens
gttgattcctgagcaagctcggcccggtctcccccagctcctccccatccctttagcccatttatgtattttacagcaccactcgctacccactcgctacyccaggatgcaggttccctgaggacagagactccagaggccagcactgagcctagaacactagcatgtgcccactaaagatccactgacatagacccagct

SEQ ID NO: 558277 - DNA, 201 bp, Homo sapiens
ggattggggcccagggtccttcccacccagagacctcgcagaaacaagactttgcaggaccagaaactaaaggaaacagccacgatctcagagccaagggmcagagtcttggattctaggctcagttctgttcggactcactcagtcttccgtgcaccatgggactcagttttccctcccactatgtggaaaagaatagct

SEQ ID NO: 558278 - DNA, 201 bp, Homo sapiens
ccccagccgtcacacagcactcccggctcaaggcatccagtgcagccacagcgtcctggtgtccgaagctagagggccgggcagagcaggatagtggggayaggggtactgcatgaactcacgggcacacactcccacaccctctctcacaccatccacacaccctctcccatccacactcacagcgtctccacgtaggag

SEQ ID NO: 558279 - DNA, 201 bp, Homo sapiens
gagggaaagtggggagggttcctgccaggccctgtgctaggagctggccctgccctgagaaggttcccttctggcaggaagaaagaccttaaagagctaaytccaggggcctaggcagtgtggcagagacaggctgagcattcaagcacactcactcaccagggggatgtcacagagaaggtcaagctgccggaagccttc

SEQ ID NO: 558280 - DNA, 201 bp, Homo sapiens
gggggtaggtcatgggcactcagacacagagaatccaaggcagcccactccctctgatcatgtgcctgaagacatctagtctctgtccactcccctaaccrtgtttcccaagactcactcgtaaacctgcccctgacttccccagaagggaccttgaaaactctcaggaaagccaaagctggaccatgccccagaaataat

SEQ ID NO: 558281 - DNA, 201 bp, Homo sapiens
ttcttttcctgtgcagtttcctccagctcctcctcctcctcctcctcaggcttccttggagctaggctgtgggcaggaaggggctgggtctgaggggctcmccttgttcctctgaccgctaggatcgtgccttctggatgctcaccttgccatccaacctcccctattccctgctagcccacatggtcggtgactacactg

SEQ ID NO: 558282 - DNA, 201 bp, Homo sapiens
aacttgaggctgttgataaaacccacctgagcagaaagacaacacggaaagacattagaacgccccccgccaccaccgtcctcagcatcacagtcaagggytgggccttatcaggcctgggttaaatccctgctctgcctcctgccacctggtgacacaggccagcccttcacttgtcagggcctcagcctccacatctgc

SEQ ID NO: 558283 - DNA, 201 bp, Homo sapiens
tctccccgcagcccgtgagcttcacgctgcagggcaagtggtcgcttcttggagagaccccacaaggccacagagctataaacagggagggaatacagcastgagggggccagaggcagaaaaggccccctgtgtaacacaaaggattaatgcttgaggggatggataccccatttcccatgatgtgattattacatattg

SEQ ID NO: 558284 - DNA, 201 bp, Homo sapiens
cactcccggctcaaggcatccagtgcagccacagcgtcctggtgtccgaagctagagggccgggcagagcaggatagtggggataggggtactgcatgaaytcacgggcacacactcccacaccctctctcacaccatccacacaccctctcccatccacactcacagcgtctccacgtaggagttctctgccacattcca

SEQ ID NO: 558285 - DNA, 201 bp, Homo sapiens; identical to SEQ ID NO: 408802

SEQ ID NO: 558286 - DNA, 201 bp, Homo sapiens
gccacctggtgacacaggccagcccttcacttgtcagggcctcagcctccacatctgcgagatgggggtaagcagagcacggggctagcagtgagtttgtraggatgaaggaggcagtgtacacccagtatggcctgaggctggctcctggtggtggggccctggagaccccatgactgtccccactgacctagaccctgc

SEQ ID NO: 558287 - DNA, 201 bp, Homo sapiens
tggggataggggtactgcatgaactcacgggcacacactcccacaccctctctcacaccatccacacaccctctcccatccacactcacagcgtctccacrtaggagttctctgccacattccacaccttcacggagcgatcgtgggatgtgctgtagagctggtgggtgcctctgcggaatgccagaccctaagggtgca

SEQ ID NO: 558288 - DNA, 201 bp, Homo sapiens; identical to SEQ ID NO: 408804

SEQ ID NO: 558289 - DNA, 201 bp, Homo sapiens
ccaccccccagcccttcttccagtccccctcttccatgaggagacccactctgctcccaccctctgaaaacctaaagcacagcccaaatcccccaccccascagcatacctagggagctcctagtcctggtaaaacggcaggagtagggctggggatgctgagaaaggaaccaggaatcctgtccaggcaggtcctacctc

SEQ ID NO: 558290 - DNA, 201 bp, Homo sapiens; identical to SEQ ID NO: 408854

SEQ ID NO: 558291 - DNA, 201 bp, Homo sapiens
tcagggggcaccccaaagagggggcactgccaggtagctgggggagtggcatggggcaggggcccagttctcagcagcagacactctgtacagttttttcmatccctgtttttgaataaatattctcagcgaccaggaagttgtgaaatactggtgttgtgggcagcaaaacctccagaaaatgggtgcagctgaggtcct

SEQ ID NO: 558292 - DNA, 201 bp, Homo sapiens
gggacttctttgagttgcagcaacatctttgaggggcacagaggcctgagtgatcacatctgacttggaagcctggggagggcttcacagaggaggtggcrtttgagaaggattttgacagagagtggggaggatgggcgttttgagctgaggtaagcctggagaaaggcccgaagggctggaggtgctaagtgtgttctg

SEQ ID NO: 558293 - DNA, 201 bp, Homo sapiens
gaggtgctgccctggggcagggagagagggggcaggagatgggccctgggtctgccttgtcggggaccccaaaccctatgcctgtgctgcaggtggggcarggcagggctgcagggatggatgatgagctccagggatcatgtgcatttccctgggggtcatggtgggggcctgaggccactgggcagctggggaggttat

SEQ ID NO: 558294 - DNA, 201 bp, Homo sapiens
cgtgctgtggcccagggtccacccccaccacaccctgcctccctggatgctccgagccattccccagcatcactgggtgtggctagcatggctgctttggkagtgggaataggagaagggggctgctaggtggggagctgggggtgctgagaggatgtggggggatgtgagatggagagtgaagcccaggtgggtccacag

SEQ ID NO: 558295 - DNA, 201 bp, Homo sapiens
tgcgccagatctgcgctgttatcctggaggtgctgccctggggcagggagagagggggcaggagatgggccctgggtctgccttgtcggggaccccaaacsctatgcctgtgctgcaggtggggcagggcagggctgcagggatggatgatgagctccagggatcatgtgcatttccctgggggtcatggtgggggcctga

SEQ ID NO: 558296 - DNA, 201 bp, Homo sapiens
gctgcccggcgctcattctatatctgcagagcagtgcccggatcaccatctccgagggctcctgccctgaacgcatcaccaccatcaccgggtctacagcrgctgtcttccatgcagtctccatgattgctttcaaactggatgaggtccgtggctggccagggcaggacgccaagagtggttccccaggaggaacccaac

SEQ ID NO: 558297 - DNA, 201 bp, Homo sapiens
gcaggtggggcagggcagggctgcagggatggatgatgagctccagggatcatgtgcatttccctgggggtcatggtgggggcctgaggccactgggcagytggggaggttatcggagcctgagagggtcctgacagagccctgtttatgccttccagtccccacccaaaggagccactatcccctaccatccgagcctct

SEQ ID NO: 558298 - DNA, 201 bp, Homo sapiens
caggttgcagcgcggacacactcgcaggtcgctgtggccccagcctcgcctgacagaatgagcggctcggacgggggactggaggaggagccagagctcarcatcaccctcacgctgcggatgctgatgcacgggaaggtgagcgggaggtggagggccaggcgaggcaaggctgggctgggctgggtttcactgggtatc

SEQ ID NO: 558299 - DNA, 201 bp, Homo sapiens
gcgagctgttacggtatctggggtgcctgatgccatcatcctgtgtgtgcgccagatctgcgctgttatcctggaggtgctgccctggggcagggagagarggggcaggagatgggccctgggtctgccttgtcggggaccccaaaccctatgcctgtgctgcaggtggggcagggcagggctgcagggatggatgatgag

SEQ ID NO: 558300 - DNA, 201 bp, Homo sapiens
gttacggtatctggggtgcctgatgccatcatcctgtgtgtgcgccagatctgcgctgttatcctggaggtgctgccctggggcagggagagagggggcargagatgggccctgggtctgccttgtcggggaccccaaaccctatgcctgtgctgcaggtggggcagggcagggctgcagggatggatgatgagctccagg

SEQ ID NO: 558301 - DNA, 201 bp, Homo sapiens
gctgccctggggcagggagagagggggcaggagatgggccctgggtctgccttgtcggggaccccaaaccctatgcctgtgctgcaggtggggcagggcarggctgcagggatggatgatgagctccagggatcatgtgcatttccctgggggtcatggtgggggcctgaggccactgggcagctggggaggttatcggag

SEQ ID NO: 558302 - DNA, 201 bp, Homo sapiens
gcccaggatgctcatgttcgtgctgaaccagcaggacatgtgtccccaggggcttgccttccgccacaaaggctcttacaatccatgaactccctaggagmtgagctcctgccctccctgttccctgggtcaccctcattgcctcaggaccagtacctgggaccctattctttccccatctgaaaaaatcccctggtcttc

SEQ ID NO: 558303 - DNA, 201 bp, Homo sapiens
caccctatgccatctccctctccaacttcatcggcctcaagcccatgcccttcttggctttaccacctgcttccccagggccgccgccgggcttggcggcmtacactgccaagatggcagcagctaatgggagcaagaaggctgagcggcagaaattctccccctactgaggccagctgaggtacaggcaggggcaggcag

SEQ ID NO: 558304 - DNA, 201 bp, Homo sapiens; identical to SEQ ID NO: 408860

SEQ ID NO: 558305 - DNA, 201 bp, Homo sapiens
gggcagggcagggctgcagggatggatgatgagctccagggatcatgtgcatttccctgggggtcatggtgggggcctgaggccactgggcagctggggargttatcggagcctgagagggtcctgacagagccctgtttatgccttccagtccccacccaaaggagccactatcccctaccatccgagcctctccctagg

SEQ ID NO: 558306 - DNA, 201 bp, Homo sapiens
aggagggcccgttgggtagctggggccaggcttctctccccaccacctgcagatttcttgctgcttccactgatacccttttgactggaatgaactggctrggcttgtcagggggcaccccaaagagggggcactgccaggtagctgggggagtggcatggggcaggggcccagttctcagcagcagacactctgtacagt

SEQ ID NO: 558307 - DNA, 201 bp, Homo sapiens
tttgactagcccagctctggggtccccatgtaagggcaggggcagggtggactgggctcctctcgaacccctctttggctgcccctgccagagccggccargttgcagcgcggacacactcgcaggtcgctgtggccccagcctcgcctgacagaatgagcggctcggacgggggactggaggaggagccagagctcagca

SEQ ID NO: 558308 - DNA, 201 bp, Homo sapiens
tccacagagcgagctgttacggtatctggggtgcctgatgccatcatcctgtgtgtgcgccagatctgcgctgttatcctggaggtgctgccctggggcarggagagagggggcaggagatgggccctgggtctgccttgtcggggaccccaaaccctatgcctgtgctgcaggtggggcagggcagggctgcagggatgg

SEQ ID NO: 558309 - DNA, 201 bp, Homo sapiens
tgagctccagggatcatgtgcatttccctgggggtcatggtgggggcctgaggccactgggcagctggggaggttatcggagcctgagagggtcctgacaragccctgtttatgccttccagtccccacccaaaggagccactatcccctaccatccgagcctctccctaggtactgttcttctctctgccaaccaggtga

SEQ ID NO: 558310 - DNA, 201 bp, Homo sapiens
agctccagggatcatgtgcatttccctgggggtcatggtgggggcctgaggccactgggcagctggggaggttatcggagcctgagagggtcctgacagarccctgtttatgccttccagtccccacccaaaggagccactatcccctaccatccgagcctctccctaggtactgttcttctctctgccaaccaggtgagg

SEQ ID NO: 558311 - DNA, 201 bp, Homo sapiens
ggcgggaaaggcccagaaccacactcagtccctcttctccccctcaggactggatcccggcacacagaccagctcacaggagttcttggttcccaacgatktgagcaggggatgggatggctggagggtgggtagggggtctgggggtctggacctcacccagggctgaattctgccttccctctagttgattggctgtgt

SEQ ID NO: 558312 - DNA, 201 bp, Homo sapiens
tagtgacttttggtaggtgggagtgtgcctcaattcccccctcaacccctgcctcaagcctttaccaggcagtggcaagacctgaccacacccgaggcctscctgccttcaaggcttcccatggctgctccagcttcctccccagctgctcttctgtgctccatccaccatctggctgctggacgaaagtgcctctcatat

SEQ ID NO: 558313 - DNA, 201 bp, Homo sapiens
gatgattggctatcccgggaggctgggaggccaagaggctgggcacatgtgtccaagatgctggggcagttcttatgaaggcctggctagttaggagagtsagcatctccagagaagggattgggcaggagagttaggagccctcgatgcagacgtgctgtggcccagggtccacccccaccacaccctgcctccctggat

SEQ ID NO: 558314 - DNA, 201 bp, Homo sapiens
gccaggcttctctccccaccacctgcagatttcttgctgcttccactgatacccttttgactggaatgaactggctgggcttgtcagggggcaccccaaaragggggcactgccaggtagctgggggagtggcatggggcaggggcccagttctcagcagcagacactctgtacagttttttcaatccctgtttttgaata

SEQ ID NO: 558315 - DNA, 201 bp, Homo sapiens
ccttttgactggaatgaactggctgggcttgtcagggggcaccccaaagagggggcactgccaggtagctgggggagtggcatggggcaggggcccagttytcagcagcagacactctgtacagttttttcaatccctgtttttgaataaatattctcagcgaccaggaagttgtgaaatactggtgttgtgggcagcaaa

SEQ ID NO: 558316 - DNA, 201 bp, Homo sapiens
ctgtgctgcaggtggggcagggcagggctgcagggatggatgatgagctccagggatcatgtgcatttccctgggggtcatggtgggggcctgaggccackgggcagctggggaggttatcggagcctgagagggtcctgacagagccctgtttatgccttccagtccccacccaaaggagccactatcccctaccatccg

SEQ ID NO: 558317 - DNA, 201 bp, Homo sapiens
gcccagtgctgaatgaaccctgcccagaggtgtctgtagtgagcttctgccctagtgacttttggtaggtgggagtgtgcctcaattcccccctcaacccytgcctcaagcctttaccaggcagtggcaagacctgaccacacccgaggcctccctgccttcaaggcttcccatggctgctccagcttcctccccagctgc

SEQ ID NO: 558318 - DNA, 201 bp, Homo sapiens
aggagcagtgggacacattactggagaagggggattgagatagaggaggggatggaagaaggaattggaggtccagggacgggggaaggagtgactctggytgaactgcaatgtcacagtaacccccttttcatccactttgtccccacagggcttctctgtccagggtcagtatggggctgtgaccccagctgaggtgag

SEQ ID NO: 558319 - DNA, 201 bp, Homo sapiens
atggaagaaggaattggaggtccagggacgggggaaggagtgactctggctgaactgcaatgtcacagtaacccccttttcatccactttgtccccacagrgcttctctgtccagggtcagtatggggctgtgaccccagctgaggtgagtgacccatagcccaaggcaccccttcctgaaccatgcctcctctgacctct

SEQ ID NO: 558320 - DNA, 201 bp, Homo sapiens
tgcagggaggagggagacgctgggaacctgagctggtgcgcctcctgctgcctcggtgggcggtggctgtgatgaatatttgatgccacacctggccacgyggcgttgggggctgtctgggcccatggcggggctgatacatgctggtggcggcaggtgaacgggcagaatgtggagggactgcgccatgctgaggtggtg

SEQ ID NO: 558321 - DNA, 201 bp, Homo sapiens
gctcgtcccgaagtgacctgcctggttccgacaaggacactgaggtatggatgttctccactcctgagctcacacgtggggttgctagaggccttggggtrggcgtctgtggagatgtcagcccgggcagtggggtctctgttcaggaagtcctcgtgagccccagccccagcaggcagcctctgttggttgctccctagg

SEQ ID NO: 558322 - DNA, 201 bp, Homo sapiens
cagtggggtctctgttcaggaagtcctcgtgagccccagccccagcaggcagcctctgttggttgctccctaggaggggccaccgtctggggtgtgggacyagggctcactccagacaccccacccaccgtgctcaccccaggatggcagtgcctggaagcaagatcccttccaggagagcggcctccacctgagccccac

SEQ ID NO: 558323 - DNA, 201 bp, Homo sapiens
cgcctggctagtgtactcatcactgtctgcaggccggtgagtctttgtgtctgtactctagtgtgtcccagctggtgtgtctgggaccgggctgagttggycattgctggcaaccacattccttagctacaaaggcactactcctcctcagaggctgcctagcctggctggggttactggccgaagcctcctgcctcctgg

SEQ ID NO: 558324 - DNA, 201 bp, Homo sapiens
gctggtcctggaacctagagattagcaggttggttcagctggacctggagctggtctcctgtttacctggtgccttgtctgtcactctgtcggccggcccyatgccttccacccagagtgtctgctgtgtaaggttgtttgctgaagaatgtggggatcaggccaggggcctggacctgagggattgagggtagggctgcc

SEQ ID NO: 558325 - DNA, 201 bp, Homo sapiens
tggtgccactgcccatgtgctgcccggaatgtgggccactgacccgctcctatcgcccattcgccccaggtggtgcaaaggatcaaggctgtggaggggcwgactcggctgctggtggtggaccaggagacagatgaggagctccgccggcggcagctgacctgtaccgaggagatggcccagcgagggctcccacccgcc

SEQ ID NO: 558326 - DNA, 201 bp, Homo sapiens
ctgcctgtcactgccaggcgcccggtgcctgccccgccgcatctggagtccaccagaggcccgaggccccctgccgagtggaggagcacacactggggggkggtgtgcctctgtgcacatgtgtgcgtgtgcaggtgttgtgtgtgtctgtgaaaccacaatctgcccttggtttcccagctcaatggtggctctgcgtgc

SEQ ID NO: 558327 - DNA, 201 bp, Homo sapiens
ttgggcctgcaggatgtcagtgggcccctgagggagctgcgccctcggctctgccacctgcgaaagggacctcagggctatgggttcaacctgcatagtgwcaagtcccggcccggccagtacatccgctctgtggacccgggctcacctgccgcccgctctggcctccgcgcccaggaccggctcattgaggtaccggcc

SEQ ID NO: 558328 - DNA, 201 bp, Homo sapiens
ctaagctcctgccccagcccctgcttgctgggcccacgggggtggggcggctcattttcctggaatgtgaaagcaaacagagccgccaccgcagccagccycacggaggcctctggagagaaaacaaaactgctggcctaggagcgcctgccccacgctctggaggagagcccggggcagggggacgcacaggcagagccc

SEQ ID NO: 558329 - DNA, 201 bp, Homo sapiens
cagaatgaccctgagaacactgaggggtccttggcctggcctcagggccccagacacccaccagatcctgcttcctgtctggtgccctgagaaaccctgcyccgcaggccgctgtgcaggcgtgggaagggctgccgggccagcactgtggggctggccgcatgtgtgggctgctgtgcgtgtttgcaggtgtgtgtggac

SEQ ID NO: 558330 - DNA, 201 bp, Homo sapiens
cccacagctaaagctctgtcacaggcagcctgggtgcccggagtgtttgccactgagacctgggcctgcccgtggggggcacggtaccgagtttgggcagyggcggcaccaccggggagtggcctctggaggcgggaggctggagcaagagactgaccctgtccgttgggcctgcaggatgtcagtgggcccctgagggag

SEQ ID NO: 558331 - DNA, 201 bp, Homo sapiens
ggcctggctcagtccctcctatctgttcaccacccctgctgagcccggcagctggtggggagccttgtccaccctcccccaggccgcaggtgggagtaggsctgcccctcttcctgcccacttcccagtgggcactgctttctctccgcgggtgtgcgctggccccccgcgtggtccagacacttcacaggcacctgcacg

SEQ ID NO: 558332 - DNA, 201 bp, Homo sapiens
cctgcccgtggggggcacggtaccgagtttgggcagtggcggcaccaccggggagtggcctctggaggcgggaggctggagcaagagactgaccctgtccsttgggcctgcaggatgtcagtgggcccctgagggagctgcgccctcggctctgccacctgcgaaagggacctcagggctatgggttcaacctgcatagtg

SEQ ID NO: 558333 - DNA, 201 bp, Homo sapiens
gagacagagacagagagagagagagagagacacagagagagacagagagagagcgagcgagcgcgcggcagccgcggggcgagggcctttgctgctctgcyggggcctgctgactgaaaggaatttgtgtttttgctttttttccaaaaagatctccagctccacacatgtttccacttaataccagagacccccccccct

SEQ ID NO: 558334 - DNA, 201 bp, Homo sapiens
ttggggtccagcgtccacacaccccttttcctccaggtcccctgtccctcacagcaccgatgaatccataacctgtctacatggctggtcctggaacctaragattagcaggttggttcagctggacctggagctggtctcctgtttacctggtgccttgtctgtcactctgtcggccggccccatgccttccacccagag

SEQ ID NO: 558335 - DNA, 201 bp, Homo sapiens
agggctgccagggctggggccaggctgctgttggatagtcactgccaccctcgccctgggaacacctgcttttccaaggccctgtggggctggtctctgargactggacacacagaccatggtggactctccccactgccccaggagggcaagaggggcagttactgccccatttgacagttgaggaaactgatgccagag

SEQ ID NO: 558336 - DNA, 201 bp, Homo sapiens
ccaggctgagggttggggcctccctctttcccagccaccttccctcccccaggaggaagctccccctctgcctcaggcgtttgtccattgatttggacacraacgcatggttcaccttcctgtggaaaaatccggccctcggactttatctggagggtgcagtggcccaggcaccttgccttgggtgggaccttccccctc

SEQ ID NO: 558337 - DNA, 201 bp, Homo sapiens
tccccctctgcctcaggcgtttgtccattgatttggacacaaacgcatggttcaccttcctgtggaaaaatccggccctcggactttatctggagggtgcrgtggcccaggcaccttgccttgggtgggaccttccccctctgctatttcaggctctgggggctgcaggaagccctaggaggggcttcctctgggtgtatt

SEQ ID NO: 558338 - DNA, 201 bp, Homo sapiens
tttttagtagagacggggtttcaccatgttgctcaagctggtctcgaactcctgatctcaggtgatctgccctcctcgacctcccaaagttctgggattayaggtgtgagccactgtacccggcccctgaggtctgaggtttcatttctttctttctttttttttttttttgagacggagtttcactctgtcgcccaggct

SEQ ID NO: 558339 - DNA, 201 bp, Homo sapiens
agccgctggccaccgccgccgcaccctggcccaccccctggctgggaggtggtcattgggcctggccttgcctgcatggtcccctggcccagagccctacygcaggatgccagaggtaacatggggcagggcctgggatggtagcggggggtccttccgggcaccaggaggccctctgtgccctgtccacactaagctcct

SEQ ID NO: 558340 - DNA, 201 bp, Homo sapiens
ccagaggtaacatggggcagggcctgggatggtagcggggggtccttccgggcaccaggaggccctctgtgccctgtccacactaagctcctgccccagcscctgcttgctgggcccacgggggtggggcggctcattttcctggaatgtgaaagcaaacagagccgccaccgcagccagccccacggaggcctctggaga

SEQ ID NO: 558341 - DNA, 201 bp, Homo sapiens
aaactgctggcctaggagcgcctgccccacgctctggaggagagcccggggcagggggacgcacaggcagagccctcagggacaaccgccccaggaggccracggcgacagttcatcccacctggtgcttcctcccaccctgcctgtgcgccacgctggcctcgagccaaaggaattctcccagcaacccgggaaggcggc

SEQ ID NO: 558342 - DNA, 201 bp, Homo sapiens
cccacccgcccacgacccctgggagccgaagccagactgggcacacaccggcagccacagctccgaagctggcaagaaggtatggcgggcttggcccacasggaccaccctagcctctcccagaggctctctcagcttttgacgacgatctttgcctttggtcacctccagaagtcttggtctcttctgccttttggggct

SEQ ID NO: 558343 - DNA, 201 bp, Homo sapiens
gccagactgggcacacaccggcagccacagctccgaagctggcaagaaggtatggcgggcttggcccacagggaccaccctagcctctcccagaggctctmtcagcttttgacgacgatctttgcctttggtcacctccagaagtcttggtctcttctgccttttggggctccttttctgccccagggaccatcttgttgg

SEQ ID NO: 558344 - DNA, 201 bp, Homo sapiens
cagactgggcacacaccggcagccacagctccgaagctggcaagaaggtatggcgggcttggcccacagggaccaccctagcctctcccagaggctctctsagcttttgacgacgatctttgcctttggtcacctccagaagtcttggtctcttctgccttttggggctccttttctgccccagggaccatcttgttggcc

SEQ ID NO: 558345 - DNA, 201 bp, Homo sapiens
catccgctctgtggacccgggctcacctgccgcccgctctggcctccgcgcccaggaccggctcattgaggtaccggcccaccagggctgcggggtgccgrgtgccccgcacctgtccacactggggccctgggtccttgcagggaggagggagacgctgggaacctgagctggtgcgcctcctgctgcctcggtgggcgg

SEQ ID NO: 558346 - DNA, 201 bp, Homo sapiens
gcgccctcggctctgccacctgcgaaagggacctcagggctatgggttcaacctgcatagtgacaagtcccggcccggccagtacatccgctctgtggacscgggctcacctgccgcccgctctggcctccgcgcccaggaccggctcattgaggtaccggcccaccagggctgcggggtgccgagtgccccgcacctgtc

SEQ ID NO: 558347 - DNA, 201 bp, Homo sapiens
aaaggcactactcctcctcagaggctgcctagcctggctggggttactggccgaagcctcctgcctcctggctaaggagaacagagccttttctctgtggkttctgacccctgaggtgtgtctgtctcccacaggccagggactccctccagaccctggttggggtccagcgtccacacaccccttttcctccaggtcccc

SEQ ID NO: 558348 - DNA, 201 bp, Homo sapiens; identical to SEQ ID NO: 219834

SEQ ID NO: 558349 - DNA, 201 bp, Homo sapiens
ccctcccgaactgggctcctgtccccacgccttccctccgtcccaggccagcctgggggctgtgctccacttcccctcccgaactggactcctgtccccasgccttccctgcgtcccaggccagcctgggggccgtgctgtgactgcatccctgaggggcactttggtgggcaggtgtcagggtcagccttgaagccccac

SEQ ID NO: 558350 - DNA, 201 bp, Homo sapiens
cccgcaggccgctgtgcaggcgtgggaagggctgccgggccagcactgtggggctggccgcatgtgtgggctgctgtgcgtgtttgcaggtgtgtgtggaygtcttgtgtctgtggctgtgtgatgtgtctttgcggactgggcccatatcacgctcccacctcctccactgaattgggctcctgtccccacgccttccct

SEQ ID NO: 558351 - DNA, 201 bp, Homo sapiens
ctgaagctgtctgtcttatcttcctggaggccctgatggcattatctccatgttctctcctacctttttttttttttttttttcattttcaaagagaaccytggccgggtgcggtggctcacgcctgtaatcccaacacttcgggaggctgagatgggtggatcacctgaggtcaggaattttgagaccagcttgactaat

SEQ ID NO: 558352 - DNA, 201 bp, Homo sapiens
agccccttcccagccccgcctggagaagaccctgggctaagggcaaggctctgggagcaccctgaagccctcacagcctgggcctcagtgtccggagcctragtgcagagggagggagccgctggagtccgggggtggggggcggggccggcaggcctcttggtgcagccacccgcccatgcagaccagccgcctgtccgc

SEQ ID NO: 558353 - DNA, 201 bp, Homo sapiens
ccggcctgcaggagagactcttaagggtctatccctgggcactgattctttagaagagaaggtgggggaggaagcagccttaggggggcagtagggccggmcctgagtgatctagagcctggctgggggagggcgtgtttctggccagagtgactaaggctcctcctgcaccaccctctcaaccagggcccccaaaagaag

SEQ ID NO: 558354 - DNA, 201 bp, Homo sapiens
acctgccccctacatacctgccccgtacatacctgccccgtacatactgccccgtccatacctgccccgtacatacctgcctcatacatacctgccccatmcatacctatgggtcactatgtgttccccgctggcctctctgtctccacctctacattgcacagcctgtgcttcacacagcaccagccagagaccttacca

SEQ ID NO: 558355 - DNA, 201 bp, Homo sapiens
tgatcctcagtctcccccaacaaaaatgcagactgtcaagtgagataatgcatgaaaaggacttagcttgtgactcagatgctgccctcagtaggggcggygtgatagtcacccctacatctgggggctgggcacggggctcctgcctatcactgccccctctgggggttctgctagggcccccagccacccactaactca

SEQ ID NO: 558356 - DNA, 201 bp, Homo sapiens
atgcaggccgggcatggtggctcacgcctgtaatcccagcactttgggaggccgaggcaggaggatcatttgaggccaggagttgcagaccaacctggacrgcatcgtgaaaccctatctctacaaaaaatacaaaaattagctgggcgttgtggcgagtgcctgtagtcgcagctacttgggaggctgaggtgggaggat

SEQ ID NO: 558357 - DNA, 201 bp, Homo sapiens
ctaaggcaggcagaccgtttgagctcagggcttcgagaccagcctgggcaacatgacgaaacccgtctctacaaaaaaatacaaaaaattagccgggcacrgtggcgcatgcctgtggtctcagctacatggggggtgaggtgggaggattgcttgagtctgggagctccaggctgcagtgagctgtgtttgtgccactgc

SEQ ID NO: 558358 - DNA, 201 bp, Homo sapiens
agagcgagactcaaaaaaaaaaaaaaaaaaaaaaatccaatcagatcacatcgcagcctgcacttggaagaaagtccgagctccccactcccaggtgctgscccacgccccttgctccccaccgtctgcccacactggtctcctctctgtcccaccaactttccaaggcctcctctgccaccaggcctgtgcaaatgcggg

SEQ ID NO: 558359 - DNA, 201 bp, Homo sapiens
aagcgggtcattacgctgagaaaggttggcagtgctgggtgggctggggagtgggtgcccgagggctgccagcctgtcctgccctgcggcctgctacgagygggatggagtggtgggagcagaaggggagggctctggtaggaactaggtgagcaagaccttcctggtggggcttggaggttcacagcagggtgtggggga

SEQ ID NO: 558360 - DNA, 201 bp, Homo sapiens
gtgttcatctccctggacagactccaggcaggcagaggccctgggcggggccacagctgccaccaagagcctggtatgcaggaggtgctctgtaaataccygccccatacatacccgccccatacatacccaccccatacatacccaccccatacatacctgccctgtccatacctgccccctacatacctgccccgtcca

SEQ ID NO: 558361 - DNA, 201 bp, Homo sapiens
gcagaggccctgggcggggccacagctgccaccaagagcctggtatgcaggaggtgctctgtaaatacctgccccatacatacccgccccatacatacccrccccatacatacccaccccatacatacctgccctgtccatacctgccccctacatacctgccccgtccatacctgccccctacatacctgccccgtccat

SEQ ID NO: 558362 - DNA, 201 bp, Homo sapiens
cctgtaatcccagcactttgggaggccgaggcaggaggatcatttgaggccaggagttgcagaccaacctggacagcatcgtgaaaccctatctctacaamaaatacaaaaattagctgggcgttgtggcgagtgcctgtagtcgcagctacttgggaggctgaggtgggaggatcacttgagcttgggaagtcaaggctg

SEQ ID NO: 558363 - DNA, 201 bp, Homo sapiens
aaatcaagccagacatggtggatcacgcctgtaaccccagcactttgggaggccaaggcaggcggatcacctgaggtcaggagttcgagaccagcctggcyaacatggcaaaaccccatctctagtaaaaatacaaacaaattagctgggcatggtgggcgcctgcaatcccagctacttgggagactgaggcaggagaat

SEQ ID NO: 558364 - DNA, 201 bp, Homo sapiens
agggaggcagaggttgcagtgagccgagatcgccccactgtactccagtctgggcaacagagcgagactccattaaaaaaaggccgggcgtggtggctcaygcctgtaatcccagcactttgggaggctgaggcgggcggatcatgaggtcaggagatgcagaccatccgggccaacacagtgaaaccctgtctcaactaa

SEQ ID NO: 558365 - DNA, 201 bp, Homo sapiens
tccagctccacatccagcctgcccgagtagggagctggagctggcagggactcccctgagctcaactgcaggagagactcttttttttttttttttttttwttttttgagatggagtctcgctctgtcacccaggctggagtggtgtgccgtgatcttggctcactgccacctccacctcctgggttcaagcaattctcca

SEQ ID NO: 558366 - DNA, 201 bp, Homo sapiens
ggagacttgtaggctgtgtggggtggatgaaccctgaagcgcaccgcactgtctgccccaatgtctaacaaaggccggaggcgactcttcctgcgaggtckcagagcgctgtgtaaccgcccaaggggttcaccttgcctgctgcctagacaaagccgattcattaagacaggggaattgcaatagagaaagagtaattca

SEQ ID NO: 558367 - DNA, 201 bp, Homo sapiens
agagcgctgtgtaaccgcccaaggggttcaccttgcctgctgcctagacaaagccgattcattaagacaggggaattgcaatagagaaagagtaattcacrcagagctggctgtgcgggagaccggagttttatgttttattattactcaaatcgatctctttgagcatttgcggagcagaggtttttttttttttttttt

SEQ ID NO: 558368 - DNA, 201 bp, Homo sapiens
tgctcgggccgggcagaagggctatcaccaccgcacggagctcaacaagaaggtgcgtcctcagccggggtacggggacactgtgtggtcggaccccagcyctcagtactggcctcagtgggtggggtgcatgacccagacactgccggggacacaagatgcccccaccagcactgagtctgagcatgtgggcggatgggc

SEQ ID NO: 558369 - DNA, 201 bp, Homo sapiens
ttgtaggctgtgtggggtggatgaaccctgaagcgcaccgcactgtctgccccaatgtctaacaaaggccggaggcgactcttcctgcgaggtctcagagygctgtgtaaccgcccaaggggttcaccttgcctgctgcctagacaaagccgattcattaagacaggggaattgcaatagagaaagagtaattcacacaga

SEQ ID NO: 558370 - DNA, 201 bp, Homo sapiens
ctgccaagtccatcacaccgctggtgaggctgggagggggcgactgccaggcccatcacaccgctgatgatggctggagtggggtcaggctggccgggggscctggtatacattgtagggggcatgccccagcctcagctggacgctccctgccccaagggctcaagatttttgccccacagctggacgctgccccgccag

SEQ ID NO: 558371 - DNA, 201 bp, Homo sapiens
caccttctcagagaagccctctctgccctgaccactgtatctgaaacaccagcccccatagcccatcagagcactctgtcctctccaagagttacttggtytccttctgtcccccagtgagatggtggctcccgaggtgtgggactctgtctgcctcattctgcaccggatccgcagtgcctagcacaacacatgggttgc

SEQ ID NO: 558372 - DNA, 201 bp, Homo sapiens
ccttctcagagaagccctctctgccctgaccactgtatctgaaacaccagcccccatagcccatcagagcactctgtcctctccaagagttacttggtttycttctgtcccccagtgagatggtggctcccgaggtgtgggactctgtctgcctcattctgcaccggatccgcagtgcctagcacaacacatgggttgcaa

SEQ ID NO: 558373 - DNA, 201 bp, Homo sapiens
tggcagctccagggcaggctgcctggaggcagtggggaccagcctggcctctcagccaccagcccctctcactcacaggggtcacaagccgctggcatacyaagaagctgccgcggaagacccataagggcctgcgcaaggtggcctgcattggcgcctggcaccccgcccgcgtgggctgctccattgctcgggccgggc

SEQ ID NO: 558374 - DNA, 201 bp, Homo sapiens
atgaaccctgaagcgcaccgcactgtctgccccaatgtctaacaaaggccggaggcgactcttcctgcgaggtctcagagcgctgtgtaaccgcccaaggkgttcaccttgcctgctgcctagacaaagccgattcattaagacaggggaattgcaatagagaaagagtaattcacacagagctggctgtgcgggagaccg

SEQ ID NO: 558375 - DNA, 201 bp, Homo sapiens
ccaaaagaagcatctggagaaggaaacgccggagacctcgggagacttgtaggctgtgtggggtggatgaaccctgaagcgcaccgcactgtctgccccartgtctaacaaaggccggaggcgactcttcctgcgaggtctcagagcgctgtgtaaccgcccaaggggttcaccttgcctgctgcctagacaaagccgatt

SEQ ID NO: 558376 - DNA, 201 bp, Homo sapiens
agtgaaaccctgtctcaactaaaaatacaaaaaattagctggtcgaggtggcgggcacctgtagtcccagctactcaggaggctgaggcaggggaatggcrtgaacccgggaggcagagcttgcagtgagccgagatcatgccattgcactccagcctgggcgatagagcgagactcaaaaaaaaaaaaaaaaaaaaaaat

SEQ ID NO: 558377 - DNA, 201 bp, Homo sapiens
ccctgtctcaactaaaaatacaaaaaattagctggtcgaggtggcgggcacctgtagtcccagctactcaggaggctgaggcaggggaatggcgtgaaccygggaggcagagcttgcagtgagccgagatcatgccattgcactccagcctgggcgatagagcgagactcaaaaaaaaaaaaaaaaaaaaaaatccaatca

SEQ ID NO: 558378 - DNA, 201 bp, Homo sapiens
taaaaatacaaaaaattagctggtcgaggtggcgggcacctgtagtcccagctactcaggaggctgaggcaggggaatggcgtgaacccgggaggcagagyttgcagtgagccgagatcatgccattgcactccagcctgggcgatagagcgagactcaaaaaaaaaaaaaaaaaaaaaaatccaatcagatcacatcgca

SEQ ID NO: 558379 - DNA, 201 bp, Homo sapiens
gcagggactcccctgagctcaactgcaggagagactctttttttttttttttttttttttttttgagatggagtctcgctctgtcacccaggctggagtgstgtgccgtgatcttggctcactgccacctccacctcctgggttcaagcaattctccagattcagcctacccagtcgttggtactacaggcacgtgccacc

SEQ ID NO: 558380 - DNA, 201 bp, Homo sapiens
gcgtgttcagccagagtgaggtcattgatgtcattgctgtcaccaagggtcgaggcgtcaaaggtagggctcagtgaggatggcagctccagggcaggctscctggaggcagtggggaccagcctggcctctcagccaccagcccctctcactcacaggggtcacaagccgctggcataccaagaagctgccgcggaagac

SEQ ID NO: 558381 - DNA, 201 bp, Homo sapiens
atgtgggcggatgggcctggatgggctgctggcctcagaggccacttcctgcccctggcatgtgcccccttctggcagatcttccgcatcggcaggggccygcacatggaggacgggaagctggtgaagaacaatgcatccaccagctacgacgtgactgccaagtccatcacaccgctggtgaggctgggagggggcgac

SEQ ID NO: 558382 - DNA, 201 bp, Homo sapiens
cagccacgccggctagtcaactaagaccctggcacgccctgaagagccgggtccccagccaagtgtgctgtgtggagggctggtcacctctcttcggtttycagcgtaagtgtgcacaggaatccgtgtttgtacatgggtctggcttgctgtaggctgacaggcaggcggcaccctccagcttattctggaacactcttt

SEQ ID NO: 558383 - DNA, 201 bp, Homo sapiens
agaccctggcacgccctgaagagccgggtccccagccaagtgtgctgtgtggagggctggtcacctctcttcggtttccagcgtaagtgtgcacaggaatycgtgtttgtacatgggtctggcttgctgtaggctgacaggcaggcggcaccctccagcttattctggaacactctttggcatctttgtcctcagggaagg

SEQ ID NO: 558384 - DNA, 201 bp, Homo sapiens
gatcggccaccatggttggtgggaccagggtgagggtgggctggggttggagctggaactctgggggggtgggacagctgggcttctggatgctccctcasagggacagtctcccagcctgtgaggggatgggaggctggagggggaaacaaggggacgagggctgggctcctgggcctgggagggccctggagatgaaca

SEQ ID NO: 558385 - DNA, 201 bp, Homo sapiens
tcctggctggccccacactctcctgtcctgcccctatgtgggcggctctccactccctcccccacaggcctcaggaggtcccccttcatgccccatccctrtgtctcatccagaaatttccaaacgggaggaggtggaggcggtgacaattgtagaaacgccgcccctagtggtggtgggcgtggtgggctacgtggccac

SEQ ID NO: 558386 - DNA, 201 bp, Homo sapiens
ggggtcactgctggccatgccatgtttcaggtgggggtgtgatcccgtgggccgtggcgtgacctccggccatgtcctgcagatgaaactgctgcccttcyggcagaagaaggcccacatcatggagatccagctgaacggtggcacggtggccgagaaggtggcctgggcccaggcccggctggagaagcaggtgcccgt

SEQ ID NO: 558387 - DNA, 201 bp, Homo sapiens
gttgggtgcctgaggctctagctcttgctgaaatgataggtgtgggtgagtaggaagcgaagtctcaaccgtctgtgggaggtaggagtgtctgtgtgtgwgtgtgtgtgtgttgtgtggttgccttcatttcaataaaagatgagtaggctgggcgtgctggctcacgcctgtaatcccagcactttgggaggccgaggc

SEQ ID NO: 558388 - DNA, 201 bp, Homo sapiens
aagggtcgaggcgtcaaaggtagggctcagtgaggatggcagctccagggcaggctgcctggaggcagtggggaccagcctggcctctcagccaccagccyctctcactcacaggggtcacaagccgctggcataccaagaagctgccgcggaagacccataagggcctgcgcaaggtggcctgcattggcgcctggcacc

SEQ ID NO: 558389 - DNA, 201 bp, Homo sapiens
atgctgccctcagtaggggcggcgtgatagtcacccctacatctgggggctgggcacggggctcctgcctatcactgccccctctgggggttctgctaggrcccccagccacccactaactcagaagccctttccgggcctggcctctgacctgtgtcctctgcagggtggcttcccccactacggggaagtgaacaacga

SEQ ID NO: 558390 - DNA, 201 bp, Homo sapiens
ccagaactcacgcttttggtccagacagggccacagtcccagggagcaccaggcctcgcccccgggaattggggtggacgctgagcacaggcagggcttcygggcgggttctgtcatggccccagctcgcagatgaggacattgaggcacaaagcagtgaggaacctggtccagtcaccggggcggtaagcgcaggagcta

SEQ ID NO: 558391 - DNA, 201 bp, Homo sapiens
aatgcatgcgtggaaggcggcaggggtcactgctggccatgccatgtttcaggtgggggtgtgatcccgtgggccgtggcgtgacctccggccatgtcctscagatgaaactgctgcccttccggcagaagaaggcccacatcatggagatccagctgaacggtggcacggtggccgagaaggtggcctgggcccaggccc

SEQ ID NO: 558392 - DNA, 201 bp, Homo sapiens
atacctgccccgtccatacctgccccctacatacctgccccctacatacctgccccgtacatacctgccccgtacatactgccccgtccatacctgccccstacatacctgcctcatacatacctgccccatacatacctatgggtcactatgtgttccccgctggcctctctgtctccacctctacattgcacagcctgt

SEQ ID NO: 558393 - DNA, 201 bp, Homo sapiens
aatccattgtaatcattagaataacaaatgctcatttgggctcagccccaccctctggggaatgctgtcctggctggccccacactctcctgtcctgcccytatgtgggcggctctccactccctcccccacaggcctcaggaggtcccccttcatgccccatccctgtgtctcatccagaaatttccaaacgggaggagg

SEQ ID NO: 558394 - DNA, 201 bp, Homo sapiens
gctgagaagctcttacacatagaaaggtattctcgggcctcaaatcttccctggcagtaagtcctgaaagaaaccttggtttcttcacctatagaatgggwataataataataataataataataataataataataataataatgtccacctcccagaactctgctgagggttagaaactatggcttctggctgggcaca

SEQ ID NO: 558395 - DNA, 201 bp, Homo sapiens
atacctgccccctacatacctgccccgtacatacctgccccgtacatactgccccgtccatacctgccccgtacatacctgcctcatacatacctgccccrtacatacctatgggtcactatgtgttccccgctggcctctctgtctccacctctacattgcacagcctgtgcttcacacagcaccagccagagaccttac

SEQ ID NO: 558396 - DNA, 201 bp, Homo sapiens
cggcctgggccgcctggtcacgcgcaagtcctggctgtggcagcacgacgagccgtgctactggcgcctcacgcgggtgcggcccgactacacggcgcaggtaggtgcgtgcaccccgtccgcaccccgcccctgcagccgcctggtctccccgcctcccctcctccctgcaggtttgcgtggctgaggctcccacctcct

SEQ ID NO: 558397 - DNA, 201 bp, Homo sapiens
ggctgtggcagcacgacgagccgtgctactggcgcctcacgcgggtgcggcccgactacacggcgcaggtaggtgcgtgcaccccgtccgcaccccgcccstgcagccgcctggtctccccgcctcccctcctccctgcaggtttgcgtggctgaggctcccacctcctgacctcgggggccgagagctttgcgagctgac

SEQ ID NO: 558398 - DNA, 201 bp, Homo sapiens
ggcctgggccgcctggtcacgcgcaagtcctggctgtggcagcacgacgagccgtgctactggcgcctcacgcgggtgcggcccgactacacggcgcaggtaggtgcgtgcaccccgtccgcaccccgcccctgcagccgcctggtctccccgcctcccctcctccctgcaggtttgcgtggctgaggctcccacctcctg

SEQ ID NO: 558399 - DNA, 201 bp, Homo sapiens
tgaacaggccgcgcgactcccagctctacgcggtggactacgagaccttgacgcggccgttctctggacgccggctgccggtccgggcctgggccgacgtscgccgcgagagccgcctcttgcagctgctcggccgcctcccgctcttcggcctgggccgcctggtcacgcgcaagtcctggctgtggcagcacgacgagc

SEQ ID NO: 558400 - DNA, 201 bp, Homo sapiens
gacagagggcgccgcctggcggagaaaggcctttcctaccccgagtatcgcccgtgccctccgccgcacctgtgtccacgcacaccgcgaggcgcttcagsacctgctccggccgcagcagccgcaacgcctcggcagccgccctgcgctcacccgctgggtcccgggctctcgcggcggcctccgagccggcggagtcct

SEQ ID NO: 558401 - DNA, 201 bp, Homo sapiens
aggaagacaaaggaagggccaagggcacccccgtctagaatgccagaaccagcgggtggccttaggggctgtgaggcagtggggaccttattgatgaaagraaccgtctttgcgttacacccgagtctgcctctcggagcagggagctcaccttccgcgacgtgttctgagggtctgcatcttaggggggagggctggggc

SEQ ID NO: 558402 - DNA, 201 bp, Homo sapiens
cctgactgacttcccagtggaactgccttcttgggctgggacagcccctttcctctgtcccttctttctctgtcccttccttccagccacactccagggcrgagttggatgaggcccgtccggagggagccatctcttgctcccgaggctgggacagtcctttctgtgggggctctagggcccctctgctgctgtgctggg

SEQ ID NO: 558403 - DNA, 201 bp, Homo sapiens
caccccagcagtcgcgagcctcggccctgccagaggaagcgctgccgccggacctgactgacttcccagtggaactgccttcttgggctgggacagccccyttcctctgtcccttctttctctgtcccttccttccagccacactccagggcggagttggatgaggcccgtccggagggagccatctcttgctcccgaggc

SEQ ID NO: 558404 - DNA, 201 bp, Homo sapiens
cccagggtggggcggggccgagcctggagctcccgggctcactgcgaccctggctgcccccaggcctcctccaccacaagggcgacaagaccagcttctcrtcgcggttcggccagggctccatcattggcgtgcacctggacacctggcacggcacactcacctttttcaagaacaggaagtgtataggtgaggccgtca

SEQ ID NO: 558405 - DNA, 201 bp, Homo sapiens
gagacaggtgtgcccgcccctcgccgccggagccaatgggcgcagggggcggggattgtttacgtctcgctccggggcggaaagtgggtcagggccgggcyggcggagcgcgcagcgggggctgcaggtgagtggcggggcacgggccgacgtctcgggctctgggcgggcgcgctgaccttgcgggcgcggcggtagcag

SEQ ID NO: 558406 - DNA, 201 bp, Homo sapiens
agtacaaacgcatactctttgttcacatatgtgtgtgttaaaaaacaaacaaacagaaaaaccctgatccttgaaggtaaaaatttctgcacttgctcagsgaggccaggaacctgaaggtattcagaacagctcaggtgtttgtctgtctgcagcccaggtgatctgacatgcttgtgggctttgcaggcagagctacct

SEQ ID NO: 558407 - DNA, 201 bp, Homo sapiens
ataccataacagcggccagcgctgagcaggttttaagatttgtgtttcacgaggagccctggcggtagcgagcggaggggaaggcgagctgcgcggcccargagacggtggcgggaggaggatgcaggcgggtgcggcggtcgggccgggggtgaggggaaggtgtcggggagcggtcacggtgcttctggcatgaggaac

SEQ ID NO: 558408 - DNA, 201 bp, Homo sapiens
tttacccagcccatttctggaggtgaccattgttaacttgctggttgtcttaccagacgcttcttctgccagtacaaacgcatactctttgttcacatatrtgtgtgttaaaaaacaaacaaacagaaaaaccctgatccttgaaggtaaaaatttctgcacttgctcagcgaggccaggaacctgaaggtattcagaaca

SEQ ID NO: 558409 - DNA, 201 bp, Homo sapiens
acttctgggagatcaagatgacctctcccgtctacggcaccgacatggtaagttgcttcggcccagggtgcttctggggaacctggctccggcagcccagycccgcgccctctgcctggcccctgttcctagatggtgggcatcgggacgtcggatgtggacctggacaaataccgccacacgttctgcagcctgctgggc

SEQ ID NO: 558410 - DNA, 201 bp, Homo sapiens
aaccggagagaggggctgggattcgcattccggagtcatgggtgtctgggtggcgtttcacaggatctacctgggttttattgagctgctcagatcctggrgtgaggtacgggctcctgaagcgttctggagccctggctgggcaccggtgcggcccctgcagtccccactttgagtgggtccgtggcccagcctggaagc

SEQ ID NO: 558411 - DNA, 201 bp, Homo sapiens
gaggagccctggcggtagcgagcggaggggaaggcgagctgcgcggcccaggagacggtggcgggaggaggatgcaggcgggtgcggcggtcgggccgggsgtgaggggaaggtgtcggggagcggtcacggtgcttctggcatgaggaactgggaggccggagatgccatttgtcaaaccggacgacagaggaggagcga

SEQ ID NO: 558412 - DNA, 201 bp, Homo sapiens
tgaaggtattcagaacagctcaggtgtttgtctgtctgcagcccaggtgatctgacatgcttgtgggctttgcaggcagagctacctgcccccatggcccytgacccccaccttggcagaccctgagggcagctgcctggcctgacggggcgcagtgaggctgggaggggtgggggtccctgtggggggtgatttcccagt

SEQ ID NO: 558413 - DNA, 201 bp, Homo sapiens
gttaaaaaacaaacaaacagaaaaaccctgatccttgaaggtaaaaatttctgcacttgctcagcgaggccaggaacctgaaggtattcagaacagctcargtgtttgtctgtctgcagcccaggtgatctgacatgcttgtgggctttgcaggcagagctacctgcccccatggcccttgacccccaccttggcagaccc

SEQ ID NO: 558414 - DNA, 201 bp, Homo sapiens
cctaacttgctctgcatgctgtcagcggctgccccgccgtcatagacttaaaggactgcaataaatgtagagttgatgtctaacacccacatggcgtgagmtgaaacgtatccgtgcagaggccgggcttgcgagcagcctgggccttctcccaggcctcactgcccctccacatccttgggagtcccctactgcttctgg

SEQ ID NO: 558415 - DNA, 201 bp, Homo sapiens
gttgcttcggcccagggtgcttctggggaacctggctccggcagcccagccccgcgccctctgcctggcccctgttcctagatggtgggcatcgggacgtyggatgtggacctggacaaataccgccacacgttctgcagcctgctgggcagggatgaggacagctggggcctctcctacacgggtgcgtgaggcccaggg

SEQ ID NO: 558416 - DNA, 201 bp, Homo sapiens
cacgctcggccgggtccagggtggccccgcagcccagggggcagcgctgctgggacccttgctggcaatgctgccggtgctctgccagggtcccacgcggmacctgcgaggtgcagccctcgttggggcaggccgttagctcaaaggggcatgagtcctggtgccccttgcgatgggccagggggcatgtcactatgcagc

SEQ ID NO: 558417 - DNA, 201 bp, Homo sapiens
ggtcccttcattagctggatgaggcattagggcatattacagggcgctctcagctctgagggtggggccggggtctgcagacactactgagtgagggtacrcacattttagtttagggagatttggtggctgagtcttttggctgactttcccctctgttctgggccacagcaatggcccccagtctcactcctgccctcc

SEQ ID NO: 558418 - DNA, 201 bp, Homo sapiens
agcgcacacgccgcaggagggacagcagcaggggccgacggcgctcctggcgcacgctccaggcgttgtgcagctcccggtagcagttgtggcgagcacgytcggccgggtccagggtggccccgcagcccagggggcagcgctgctgggacccttgctggcaatgctgccggtgctctgccagggtcccacgcggcacct

SEQ ID NO: 558419 - DNA, 201 bp, Homo sapiens
cattttctaacccaggggcttggaaaagttaggtgacttgcctaaagtcacacagcaactaagcagtagagccacgatccaaactcagctatgtctggtcrtcccaaggctgcacttgtttctctctgaagatgggattctcctgccttctctcctagccctgccccacccctacaagggtgagaagggttgagggtcagg

SEQ ID NO: 558420 - DNA, 201 bp, Homo sapiens
cagctcccggtagcagttgtggcgagcacgctcggccgggtccagggtggccccgcagcccagggggcagcgctgctgggacccttgctggcaatgctgcyggtgctctgccagggtcccacgcggcacctgcgaggtgcagccctcgttggggcaggccgttagctcaaaggggcatgagtcctggtgccccttgcgatg

SEQ ID NO: 558421 - DNA, 201 bp, Homo sapiens
tacaagggtgagaagggttgagggtcaggggagtgggtactttgagctaccttgacttccaggcggccaatggttttccggagtttattcatgtggacaayctttttccttttcacctctttcctacagcacggacaggtcttttgtctggaaggaggcatgagtaggggtgagtgttgggagtgggaagggagccctggt

SEQ ID NO: 558422 - DNA, 201 bp, Homo sapiens
gctcccggtagcagttgtggcgagcacgctcggccgggtccagggtggccccgcagcccagggggcagcgctgctgggacccttgctggcaatgctgccgstgctctgccagggtcccacgcggcacctgcgaggtgcagccctcgttggggcaggccgttagctcaaaggggcatgagtcctggtgccccttgcgatggg

SEQ ID NO: 558423 - DNA, 201 bp, Homo sapiens
gctgccggtgctctgccagggtcccacgcggcacctgcgaggtgcagccctcgttggggcaggccgttagctcaaaggggcatgagtcctggtgccccttrcgatgggccagggggcatgtcactatgcagccagcgtcggcgttcttgcactgagggtgaaggagaacgtgtgaagaaaccgggcaggacacccacggaa

SEQ ID NO: 558424 - DNA, 201 bp, Homo sapiens
tggagagggcagcagggatgcaccggtgacagttgtgagggccgcaggcacagaggcaggcaggccgggggtctgcttttatttacctatttacaaggtaygttggccctgggctcccccaccacctcagccccaacgttgccttctggggcagcctcggcctcctcctgtggggcaccctccagcagagcggtgtcttcc

SEQ ID NO: 558425 - DNA, 201 bp, Homo sapiens
gctctctacgaacgacactggtggcttggtccagccagcgcacacgccgcaggagggacagcagcaggggccgacggcgctcctggcgcacgctccaggcrttgtgcagctcccggtagcagttgtggcgagcacgctcggccgggtccagggtggccccgcagcccagggggcagcgctgctgggacccttgctggcaat

SEQ ID NO: 558426 - DNA, 201 bp, Homo sapiens
gcgagcacgctcggccgggtccagggtggccccgcagcccagggggcagcgctgctgggacccttgctggcaatgctgccggtgctctgccagggtcccaygcggcacctgcgaggtgcagccctcgttggggcaggccgttagctcaaaggggcatgagtcctggtgccccttgcgatgggccagggggcatgtcactat

SEQ ID NO: 558427 - DNA, 201 bp, Homo sapiens
agagagaagccttttagaaccgcatgtgagcagctcccaaaaggccggggaggcaccactaccttgaggtgatcctgccccccttcagccttggcatcacrcacttgaggggatactgggcgagagccttggtaacggcgcacacgtgccgactcagctcctgccaagaggccaccagtagcacgtccaggtttgcccaga

SEQ ID NO: 558428 - DNA, 201 bp, Homo sapiens
agcgccctgctgtgcagaaggagaaggcctgggattcccggtactgcctggggacagagagaagccttttagaaccgcatgtgagcagctcccaaaaggcyggggaggcaccactaccttgaggtgatcctgccccccttcagccttggcatcacgcacttgaggggatactgggcgagagccttggtaacggcgcacacg

SEQ ID NO: 558429 - DNA, 201 bp, Homo sapiens
aacttcccctgcaaccacccaccctccccctgaggtcagacctgctcagccagagaacccacccaggctgagggtccacatgtggctgggggtcctccccmaccgcccagggtgtctggtctgtccccaaggctgcatgctgtcctggtggtcccacgtgtggtcaggagcccaggtccagcaggagatcagggttggctg

SEQ ID NO: 558430 - DNA, 201 bp, Homo sapiens
ttgccactggctcgccggctgcccagcgccctgctgtgcagaaggagaaggcctgggattcccggtactgcctggggacagagagaagccttttagaacckcatgtgagcagctcccaaaaggccggggaggcaccactaccttgaggtgatcctgccccccttcagccttggcatcacgcacttgaggggatactgggcg

SEQ ID NO: 558431 - DNA, 201 bp, Homo sapiens
gaaggtcggccaggaggcccatgcgctcccgctccgtgctgcaggcctccagcgcctaggagcaggcaaaggcatgagagggcgcctggggacggggcttytgcacctggagggcttggaggaggcaggggcccacctgctgcagaaggcggggggaggggaaggctgtgacaactgcatcagccacggctgggctgaccc

SEQ ID NO: 558432 - DNA, 201 bp, Homo sapiens
cgtctcttgccactggctcgccggctgcccagcgccctgctgtgcagaaggagaaggcctgggattcccggtactgcctggggacagagagaagccttttrgaaccgcatgtgagcagctcccaaaaggccggggaggcaccactaccttgaggtgatcctgccccccttcagccttggcatcacgcacttgaggggatac

SEQ ID NO: 558433 - DNA, 201 bp, Homo sapiens
cctccgccaggccgcctgcagccctgcgccgtctcttgccactggctcgccggctgcccagcgccctgctgtgcagaaggagaaggcctgggattcccggkactgcctggggacagagagaagccttttagaaccgcatgtgagcagctcccaaaaggccggggaggcaccactaccttgaggtgatcctgccccccttca

SEQ ID NO: 558434 - DNA, 201 bp, Homo sapiens
ttattatactttaagttttagggtacatgtgcacaatgtgcaggttagttacatatgtatacatgtgccatgctggtgcgctgcacctactaacttgtcayctagcattaggtatatctaccaatgctatccctcccccctccccccaccccacatgattagctttttttacttattgtaatgtctataaggttcatccac

SEQ ID NO: 558435 - DNA, 201 bp, Homo sapiens
taacactttttttttttgagatagagtctcgctctgtcgccaaggtttgagtgcagtggtacaatgtgggctcactgtaacctctgcctcccaggctcaartaattctcatgcctcaacctcccaagtagctaggactacaggtgcatgccatcatgcctggctaattttttgtaatttttgtagggacagggtttcacca

SEQ ID NO: 558436 - DNA, 201 bp, Homo sapiens; identical to SEQ ID NO: 409300

SEQ ID NO: 558437 - DNA, 201 bp, Homo sapiens
gaaaatgcctgtcatcttatggaatgactgaggatccccccagagtactccaaagcataaccacacgtgaagagatcctcttcgctctacctctgcactasgagatgaatgattctcatcatggtgaacaaattcctgtattgtatgaacttgctgcattaagaggtcacagtagaggcgaagttcagacattttggtttt

SEQ ID NO: 558438 - DNA, 201 bp, Homo sapiens
catgagagtatagacatacaatatatctttgagagtatattgtattgatcatgcatggaaatgataaaaacattatctttccaaacactaatttaccttgycaaacaaattataagcagggggtggtgaaaatacattcctccacccaggtctagtgtgcctataggacaaattatgattttgcaagcctgcagtactgca

SEQ ID NO: 558439 - DNA, 201 bp, Homo sapiens
ataacaaaaggtcaattggaaacacattactttcaccacatagaaaactgtgatttcaaaacctgccatccacattatttcttggctctcaaataacattycgataatgaaattttcaatcaccaagccttaccaaaaatgtttttgcatcagtctccactttattgggagaggtttctggagcaagctccagagcagcaa

SEQ ID NO: 558440 - DNA, 201 bp, Homo sapiens
agacattgataaaaacgttaaacatcctgtcaatattaactccagtcctctgtgaaagaacattttaaatttcctgttcagggacatgaaattcctttagyttctggctaattttgtatttccttgtttgtttcatgcaggaaaacttaacttttagactagagtatcaacagccacaaggagaaacatcagaattcataa

SEQ ID NO: 558441 - DNA, 201 bp, Homo sapiens
tactcaacctctttaaccctcctcctctcctcctcttctcttccaggtcttgcttgattggcccaagaaagtttctttctcccttccccttcccggtttcyttccttcatttctccacccacatctcaatttaaattcaaaatgttaatgagcatagaatagtgccatatattaataaatagatgattaattcagtttaaa

SEQ ID NO: 558442 - DNA, 201 bp, Homo sapiens
attcagattgttttttggccataagtctgctttcttcaggaatggttgctgatgccaaatctccattaagtgtattttttgaacagtgaacaggtcctatraagacattgataaaaacgttaaacatcctgtcaatattaactccagtcctctgtgaaagaacattttaaatttcctgttcagggacatgaaattccttta

SEQ ID NO: 558443 - DNA, 201 bp, Homo sapiens
tacaatcaccatcaagctgctatcgtaactcatttttagctgtggtaaagtgaccatttggtccatggcacaagttacatatatcacacttctgtcaaackgaaaccttataagatttcatgtttataagctacaatacaccctgaccatgctgtcagtcccctcagagtttttaagaaaaatatctacatttgtccttat

SEQ ID NO: 558444 - DNA, 201 bp, Homo sapiens
tttacaaatgtttgaaaactagaagtcataggtttcatgaatgcatgtattttaagtcaatccatatctgatcaaaaccagcagactgaaagagatgggcraggagttcatagagctagaggtagactcactgacaacagcaagagaagataaagatggcaaaaaggggcctagaaaaactcttttaaaaatctgtctgaa

SEQ ID NO: 558445 - DNA, 201 bp, Homo sapiens
atatacaaacaaactcaaatccattagaattatattagtgcctaataaagattagacagaatatcaatgaatgtaaaaaatacaatgtattatatgatgtktttgaatgcaaaaaccacgcatttattaaacatatgattaacttaaaaacaacacaccagtttgttttaaagtgctccttatccaaaaccttaaacaaaa

SEQ ID NO: 558446 - DNA, 201 bp, Homo sapiens
ccttagaaaattaagctggggcaaaaaaagaaaaaagaaaacattaaaacatctatgtataagaaatgcctgtctcctaaacaatgtatgaaactagattytaagaaaaaataagctttgcatttaattatcatattgaaaaactgtgtacaaaagtttatcttagagaaatctaacctaaacagtaattttcactttccc

SEQ ID NO: 558447 - DNA, 201 bp, Homo sapiens
ttcataaataaaaatgtctctagatattggaaagagctgcaaacaatactttacaacagcagcttaatatctattttaggaaaaaaaaagcactaaaattytcttccattgaaagttgtttatttctctagtgtaagtgagcaaagtcactacagcattaaaatctcttttctagaacaacgtaaagaacaacgtatacac

SEQ ID NO: 558448 - DNA, 201 bp, Homo sapiens
caacataattagtacaacatcaagctttctccctaataaccattaattggaatctttttcaacacacaccaaaaacatgctggattcttttttcaaaagtraaaaccaaattttatacataatacatatatatgtgtgtgtatacaaatataaaaaacagggtatataactataaataagatataaatgtgataaaaaagg

SEQ ID NO: 558449 - DNA, 201 bp, Homo sapiens
cctgatcctgggggatgaatagagactgatctaacctagtcatggctattccaacactctttactaaatgctcattttttcctagtttcctttgagccggraaaaaaaaaaaaaaaaaaagatgagaagttggctagggaatttctgggatttttgtttcccgattcaaaaccaagcacagcaagttgagaaggactctct

SEQ ID NO: 558450 - DNA, 201 bp, Homo sapiens
agagtactccaaagcataaccacacgtgaagagatcctcttcgctctacctctgcactaggagatgaatgattctcatcatggtgaacaaattcctgtatygtatgaacttgctgcattaagaggtcacagtagaggcgaagttcagacattttggttttcagcgattcactggtttcacttatttctgaaaagaatatac

SEQ ID NO: 558451 - DNA, 201 bp, Homo sapiens
ctagttgctctgagaaataccagttgaaatgctaagagatatgacccacccagtttgtagtctgggaacatctgataagattgacattaagatgcaaatgsccactaacatctcctttaacagaaattacttcctttaggcttactaacccaaggacatccccactataataatcactcaatctgtaggtccagtgatggt

SEQ ID NO: 558452 - DNA, 201 bp, Homo sapiens
atcacttgatatacagtcatgcgtctcttaatgacaaggatgcattctgagaaatccatcgctaggtgattctgtcactgtgcaaacatcacagagcgtgyttacacaaaactagctagtatagcctactacacatgtaggctatgtggtatagcctattgttcttaggctacaaacttctactgcatgttactgtactga

SEQ ID NO: 558453 - DNA, 201 bp, Homo sapiens
tatgagctttcattgattgagcgctgtttgcttacctctgaattaaggaatcaaagaaacaaagtacaatgttcagtcagtatacttcatttccagaaatyacagagccccacagtaattttgctgaatatgccaaagaaagagacagaatctatgtcacttactatctgggtcttcaagaggaatatcactacaagaatc

SEQ ID NO: 558454 - DNA, 201 bp, Homo sapiens
cgtgcttacacaaaactagctagtatagcctactacacatgtaggctatgtggtatagcctattgttcttaggctacaaacttctactgcatgttactgtmctgaatgttgtgggtgactgtaacaatggtatttgtgtatctaaacatacctaaacatggaaaaagtacagtaaaaatatggtattataatcttatgagg

SEQ ID NO: 558455 - DNA, 201 bp, Homo sapiens
caggagaaactaagggatccggatggtgcagttgaaacatctcaggtttaaacttggcattggctatcttcacacattcctcaagcgttgtgatgaatgtrttacacgtggcactaagcagagaagaggcttcattcatgttctgaaaaattacacaaagacttgaacagatttgcatacaactacatggaatcatataca

SEQ ID NO: 558456 - DNA, 201 bp, Homo sapiens
tttccttccaacccacttcacaggtgaaagtgacttgcctgttccccttctgtgtattgacactttcttccactatttctcagttaacagaattccccaamgtaaggatacttcaatgacaatccctaagagaatattatctggggacagcttccaaaatcatgctcgctaagcttgaacaacctcaacaagacaacgttt

SEQ ID NO: 558457 - DNA, 201 bp, Homo sapiens
ttgaagccaggagtttgagaccagcttgggcaacaaaatgagaccccccccatctctacaaataataaattaaaaaacatagccaggcaccgtggtgtgcrcctgtagtcccagctactcaggaggctggaacttgggagtttgaggctgcagtgagttatgatggtgtcactgcactccagcctgggtaacagagtgaga

SEQ ID NO: 558458 - DNA, 201 bp, Homo sapiens
cgtaaatctacatttctaattatttccttgggatagatactaaaagtggacaggctaatttagttacatttatatttatatttaagaaagtactctcaccmcaagggaaaagtttatagttacctttttcttttttagtccttgtatcagtcaaacatgctttggagctccccagagcgaccagccacctctgtctttcag

SEQ ID NO: 558459 - DNA, 201 bp, Homo sapiens
aaaaaaattagcataatccatatgtcaagtagaatcatgcagctctaatttactattatcataataaacataaatttactcagagaaaaagataactggcaaaaaaaaaatttaatctttcacagactcaagcaacataattagtacaacatcaagctttctccctaataaccattaattggaatctttttcaacacacac

SEQ ID NO: 558460 - DNA, 201 bp, Homo sapiens
atgttttttaagtcctagtggtggtaaaagatcatgatattctataaatatatatctgagatacgatatttacaaagcaatcctcagcactccttagttartaacaaacctgtttgtaaggggatatatgagctttcattgattgagcgctgtttgcttacctctgaattaaggaatcaaagaaacaaagtacaatgttca

SEQ ID NO: 558461 - DNA, 201 bp, Homo sapiens
atctattaaagctgaaagtatgaatattcagtgccttagcattccactccacttctagagatacactaaacagaaatgcacacatatgttcaataaatgtrtaagaatgtttatggcagctttagtcactgtagtcccaaaacggaaataacccaaaaatccttcagtactagaatggataccaaaattgtgagatattca

SEQ ID NO: 558462 - DNA, 201 bp, Homo sapiens
ggcacaagttacatatatcacacttctgtcaaactgaaaccttataagatttcatgtttataagctacaatacaccctgaccatgctgtcagtcccctcasagtttttaagaaaaatatctacatttgtccttatggatgtcaaaatgttacaccatcatttgttcaaaaaaaaaagatgcacattcatactgtgaagtta

SEQ ID NO: 558463 - DNA, 201 bp, Homo sapiens
gtgcttggttttcttttgtgaattgcttttttattttgtcctttatacattttttccagttctgatgttggtttttctcttaacaatataaactgatagtktgtaaaagttcttacaaattaaagatagtaatctttcctctatcttatatactgcaaataccttatccagatctgttagcttcctttcagttttctttat

SEQ ID NO: 558464 - DNA, 201 bp, Homo sapiens
gtcctccacctgcgtctctgcttgcgccatttcctccagcctggagtgtctccgcccttcccgcctcccgtctccgagcttcttaaacacaggccttgggsctacggctctgggggtacttgggggggcgggggcaggtctgatgagtaacccctccccccaggttccagaggaagaagcctccacatctgtctgccgggt

SEQ ID NO: 558465 - DNA, 201 bp, Homo sapiens
cccttttctcgaattttacattaaaaaaattaaacctctgatcctatcacccccctcaaaaaaaattttttttcaaatctatcatctgataaaggatcagrgttaggttaggcctcatctcttgctgaagatattaaaaaaagacggaaccaaagggagaaacaacaggggatgtcagagatggagggagaaggaccagcc

SEQ ID NO: 558466 - DNA, 201 bp, Homo sapiens
taggtcagccctatcaagtcccaaaaacatttgaattctgcaaaacctttggcactgaaggattcaaatggggaacctggtgatattataatagtggtggrggccaggtgcggtgggtcatgcctgtaatcccagcactttgggaggccaaggcagtcagatcacgaggtcaggagttcgagaccagcctgaccaacatag

SEQ ID NO: 558467 - DNA, 201 bp, Homo sapiens
acggtttctccgtgttggtcaggctggtctcaaactcccgacctcaggtgacctgccagcctagcctcccaaagtgctgggattacaggcgtgagccaccrcgctcagccaaaatgcccctgatagtgtggtagggatttcctttattgtttgtttgcttgtttgttttgagacagggtctcattctgtctcccagcctgg

SEQ ID NO: 558468 - DNA, 201 bp, Homo sapiens
ccccatctgtactaaaaatacaaaaattagccaggcatggtggcacacacctgtagtctcagctacttgggaggctgaggcaggagaatcacttgaacccsgaagacagaggttgtggtgagccgagattgcactactgcattccaacctgggcaacacagcaagactccgtctcaaaaaaaaaaaaaagagtggtggaag

SEQ ID NO: 558469 - DNA, 201 bp, Homo sapiens
tcttgttgtttttacttaaaacagagtaggtttactgagtgcaggcatctaacttgacagctcatattgtaagaggcaggaccctggaaggcaaaagagcrgattaccccgaagcagacctgcatccagaccccagctctgccatcaacagggacatgcagcttacctctgtgagcccaatttgcctcgcaaaaatgggag

SEQ ID NO: 558470 - DNA, 201 bp, Homo sapiens
ctctgccgaggagtgggagtcccagctaacttctgctccctgctctcccaccaacagcctacaccgatttcttcctcccgctgctaagccgctgtccctcygccatgggaataaagaataaggatggggagacccctggccaaattttgggctggggacccccctgggattctgctgaagaggaggaagaagatgatgcct

SEQ ID NO: 558471 - DNA, 201 bp, Homo sapiens
tccccatctagagatttccttctggagtaagaacattacaggaaaacctctagatccagatgaacaaccctaacatcccccagctcaagtatagacagaargcccctcccccaaaactcccccaaatggtcaaaaaaccccctatttaaaaatttcctttaacgtacctgagataggctagcatattcagatttgtttctt

SEQ ID NO: 558472 - DNA, 201 bp, Homo sapiens
ggtaggcagatcacttgagccaggagttcaagaccagcctgaacaacacagtgagacctggtctgtacaaaaaatacaaaattagccaggcgtggtggtaygtggctgtcgtcctgtagtcccagttactcaggaggctgaggtgggaggatcgcttgagcccaggtggggcagagtttgcagtgagcaagatcatgccac

SEQ ID NO: 558473 - DNA, 201 bp, Homo sapiens
gatttccttctggagtaagaacattacaggaaaacctctagatccagatgaacaaccctaacatcccccagctcaagtatagacagaaggcccctcccccraaactcccccaaatggtcaaaaaaccccctatttaaaaatttcctttaacgtacctgagataggctagcatattcagatttgtttcttgttgtttttact

SEQ ID NO: 558474 - DNA, 201 bp, Homo sapiens
atgatccgcccgcctcggcctcccaaaatgctgggattagaggcgtgagccaccgcgccaggcctaaagggggcatttctaatactggagaaaggtgaactttttttttttttttttccgagacagagtctcgctgtgtcacccaggctggagtgcaatggcgcaatctcagcttgctacaacctccgcctcccgggttca

SEQ ID NO: 558475 - DNA, 201 bp, Homo sapiens
tgaaacccaggaacctgagtccttctcagcctggtcagatcgcctggcccgggaacatgcccagaagtgccagcagcagcagcgagaagcagagggatccygtcgacccccacgtgctgagggctccagccagagctggcgacagcaggaggaggagcagcggctcttcagggagcgagcccgggccaaggaggaagagct

SEQ ID NO: 558476 - DNA, 201 bp, Homo sapiens
atataattatatatatattttgtttgtttgttttagtaaagacgggttttcaccatcttggccaggctggtattgaactcctgaccttgtgatccattgtccccccccccagcctcccaaagtgctgggattacaggcgtgagccaccgtgcctggccacatctgatcctctctacagttttgtagccagcttttttcaaa

SEQ ID NO: 558477 - DNA, 201 bp, Homo sapiens
ggtcctctgccagccctgccaccagatggccttctaactccttggttgaaaggcccatctcattcagcttccagcttcctttttcttttccttttgagacrgagtcttgctttgtcgcccaggctggagtgcagtggcatgatctcggctcactataacttctgcttcctgggttcaagcgattctcctgcttcagcctcc

SEQ ID NO: 558478 - DNA, 201 bp, Homo sapiens
accatgttagccaggatggtcttgatctcctgacctcgtgatccgcccgcctcggactcccaaagtgctgggattacaggcgtgagccaccgcgcctggcygagaatattttaaactaccacacttaccatgcatgtggtaaactatcagtctgtatttatcagtgatggttatttcctaatacccaggaggcatccatgt

SEQ ID NO: 558479 - DNA, 201 bp, Homo sapiens
ttaagtgaaaagtggaatacatagtcaaagaatttgggcactgccttggtggctggaggcaggtcagaaaatgtcagttggcatggtagaacttctaggaygctgaaatagtttgtggagacacaagtaagaattttttttttttttttttgagacggagtcttgctctgtcacctaggctggagtgcagtggcacgatct

SEQ ID NO: 558480 - DNA, 201 bp, Homo sapiens
cctcccaagtagctaggattacaggcgcatgccaccacgcccagctaatttttatatttttagaagagatgggttttcgccatgttggacaagctgatctygaatgcctgacctcaggtgatccaccaacctcagcctctcaaagtgctgggattacaggtgtgagccaccacacctggccttgttcctgtttttgttatc

SEQ ID NO: 558481 - DNA, 201 bp, Homo sapiens
atataaaatataattatatatatattttgtttgtttgttttagtaaagacgggttttcaccatcttggccaggctggtattgaactcctgaccttgtgatycattgtccccccccccagcctcccaaagtgctgggattacaggcgtgagccaccgtgcctggccacatctgatcctctctacagttttgtagccagcttt

SEQ ID NO: 558482 - DNA, 201 bp, Homo sapiens
ggctggaatgcaatggtgcgatcctggctcactgcaacctctacctcccaggttcaagtgattctcatgcgtcagcctcccaagtagctaggattacaggygcatgccaccacgcccagctaatttttatatttttagaagagatgggttttcgccatgttggacaagctgatctcgaatgcctgacctcaggtgatccac

SEQ ID NO: 558483 - DNA, 201 bp, Homo sapiens
tgtttctctgttttttgtttttgtttttgttttttatgaagtttcactcttcttgcccaggctggaatgcaatggtgcgatcctggctcactgcaacctcyacctcccaggttcaagtgattctcatgcgtcagcctcccaagtagctaggattacaggcgcatgccaccacgcccagctaatttttatatttttagaaga

SEQ ID NO: 558484 - DNA, 201 bp, Homo sapiens
ctgaaatgaaagccaaccaatagttgagaaataagctggttatttggtcatcaggacctagggaaggagttaaccaagttggcatgtggctgtcatttgtscctttacattactgagctaccattgtctgaagaacccaacattccccaaagatcaactggtcttcaaatttcacatctgtttagattagtagctactttg

SEQ ID NO: 558485 - DNA, 201 bp, Homo sapiens
tttacctgggctcctgagccttaaaccaattatttacccttttctcgaattttacattaaaaaaattaaacctctgatcctatcacccccctcaaaaaaawttttttttcaaatctatcatctgataaaggatcagggttaggttaggcctcatctcttgctgaagatattaaaaaaagacggaaccaaagggagaaacaa

SEQ ID NO: 558486 - DNA, 201 bp, Homo sapiens
aagttccctagtttcccctgggagatctggccaagaactacccggtcggggcggaacgacatccggtaacgcccctcacagttcacttccgtcctccaccwgcgtctctgcttgcgccatttcctccagcctggagtgtctccgcccttcccgcctcccgtctccgagcttcttaaacacaggccttgggcctacggctct

SEQ ID NO: 558487 - DNA, 201 bp, Homo sapiens
ccaccacgcccagctaattttttgtatttttagtagagacagggtttcactgtgttggccaggctggtctcgaactcctgacctcatgatccgcccgcctyggcctcccaaaatgctgggattagaggcgtgagccaccgcgccaggcctaaagggggcatttctaatactggagaaaggtgaactttttttttttttttt

SEQ ID NO: 558488 - DNA, 201 bp, Homo sapiens
tgggattagaggcgtgagccaccgcgccaggcctaaagggggcatttctaatactggagaaaggtgaactttttttttttttttttccgagacagagtctygctgtgtcacccaggctggagtgcaatggcgcaatctcagcttgctacaacctccgcctcccgggttcaagcaattctcctgcctcagcctcctgagtag

SEQ ID NO: 558489 - DNA, 201 bp, Homo sapiens
gttttataatcttaaaatagagccttcctaagagtgaagtgaaataaaaagtcagaaaataatatattgatatagatttaactacatgaaaattttaggcygggtgcggtagctcacacctgtaatcccacactttgggatgccaaggtaggcagatcacttgagccaggagttcaagaccagcctgaacaacacagtgag

SEQ ID NO: 558490 - DNA, 201 bp, Homo sapiens
tccgtcctccacctgcgtctctgcttgcgccatttcctccagcctggagtgtctccgcccttcccgcctcccgtctccgagcttcttaaacacaggccttkggcctacggctctgggggtacttgggggggcgggggcaggtctgatgagtaacccctccccccaggttccagaggaagaagcctccacatctgtctgccg

SEQ ID NO: 558491 - DNA, 201 bp, Homo sapiens
aatgtcaaataaaattgggggaaaagccacctacagccccaccacccataggctagaatttttacatattttttgccagtctattttttttcttttttttyttttttttttgagatgggagtctccctctgttgcccaggctggagtgcactggcatgatctcagctcactgcaacctctgccttccaggttcaagtgatt

SEQ ID NO: 558492 - DNA, 201 bp, Homo sapiens
atgttttataatcttaaaatagagccttcctaagagtgaagtgaaataaaaagtcagaaaataatatattgatatagatttaactacatgaaaattttagkccgggtgcggtagctcacacctgtaatcccacactttgggatgccaaggtaggcagatcacttgagccaggagttcaagaccagcctgaacaacacagtg

SEQ ID NO: 558493 - DNA, 201 bp, Homo sapiens
gggggaaaagccacctacagccccaccacccataggctagaatttttacatattttttgccagtctattttttttctttttttttttttttttttgagatgggagtctccctctgttgcccaggctggagtgcactggcatgatctcagctcactgcaacctctgccttccaggttcaagtgattctcctgactcagcctc

SEQ ID NO: 558494 - DNA, 201 bp, Homo sapiens
gtgattctcctgactcagcctcccaagtagctgggattacaggcacatgctaccacgcctggctaatttttgtatttttagtagagacagggtttcaccaygttggccaggctggtctcgaactcctgacctcaggtgatccacccgcctcagcctcccaaagtgctgggattacaggccatgagccaccacgcccggcct

SEQ ID NO: 558495 - DNA, 201 bp, Homo sapiens
ttacaggccatgagccaccacgcccggcctctttttttccaaccataggatttggtctcttgttttagacagttattatctgatcctctctctctctctcttttttttttttttttttttttttgagatagagtctcaccctgtcacccaggctggaatgcagaggcgcgatctcggctcactgcaacctccgcctcccag

SEQ ID NO: 558496 - DNA, 201 bp, Homo sapiens
gtggtaaactatcagtctgtatttatcagtgatggttatttcctaatacccaggaggcatccatgtgagccacccttccattgctttaagaccaagggagygagtgaccagcaggattcaagatggcagctctgccgaggagtgggagtcccagctaacttctgctccctgctctcccaccaacagcctacaccgatttct

SEQ ID NO: 558497 - DNA, 201 bp, Homo sapiens
caggtggggaacaagcgaatgagagacaggaccaggtactttctgggtgggacaagttgagagggtctgtgacaggtcacagcagcactagggagaagtgccccccccaccaaccctgatgtgatttgggtagggatggtgggccttcgccagccacacctgggccattctgtcttcttgccttcctggccttgccttccc

SEQ ID NO: 558498 - DNA, 201 bp, Homo sapiens
ttttagacagttattatctgatcctctctctctctctcttttttttttttttttttttttttgagatagagtctcaccctgtcacccaggctggaatgcaraggcgcgatctcggctcactgcaacctccgcctcccaggttcaagcagttctctgcctcaacctcccaagtagctgggattacaggcgtcagccaccacg

SEQ ID NO: 558499 - DNA, 201 bp, Homo sapiens
ttgagcccaggtggggcagagtttgcagtgagcaagatcatgccaccgcactgcagcctgggcaacagggtgagaccttgtctcaaaaagaaaaaaaaagyttttttaaagatagatagaagaaaatgtttgcaatatgtataacacatacagtatatagaaccctcatatcaatatatataatttccaaagaaaaagtgg

SEQ ID NO: 558500 - DNA, 201 bp, Homo sapiens
aattccagcagattaaatacctgaatatgacaggaaggtacacaccaaattcatgggacagatggcctggggaggaatgaaacttggaaggcggtatcacsgtaaactacctttatctgtgatgattttatttccttaaaataaattatactacaaacatgacagtacattaacaaaccctgtggtaggaatggggttgtg

SEQ ID NO: 558501 - DNA, 201 bp, Homo sapiens
atcttaaaatagagccttcctaagagtgaagtgaaataaaaagtcagaaaataatatattgatatagatttaactacatgaaaattttaggccgggtgcgrtagctcacacctgtaatcccacactttgggatgccaaggtaggcagatcacttgagccaggagttcaagaccagcctgaacaacacagtgagacctggtc

SEQ ID NO: 558502 - DNA, 201 bp, Homo sapiens
agtcgcgcaatcttggctcactgcaacctctgcctcccgggttcaagcagttctctgcctcagcctcccaagtagctgggattacaggcatccgccaccaygtcaggctaatttttgtatttttagtggagacggggtttcaccatcttggccagactggtcttgaactcctgacctcatgatccacccaccttgggctcc

SEQ ID NO: 558503 - DNA, 201 bp, Homo sapiens
ggaacatttggctcatctagggaaaaacaagagtcccacctcacacctaatcaaaaagtaaattccagcagattaaatacctgaatatgacaggaaggtayacaccaaattcatgggacagatggcctggggaggaatgaaacttggaaggcggtatcacggtaaactacctttatctgtgatgattttatttccttaaaa

SEQ ID NO: 558504 - DNA, 201 bp, Homo sapiens
ggtctccctactacaatgtgagtgatgagatctctttccactgctatgacggttacactctccggggctctgccaatcgcacctgccaagtgaatggccgrtggagtgggcagacagcgatctgtgacaacggaggtgagaagcatcccctccccctacattgctgtctccctgacggcgcccagcccgaggagtgggcac

SEQ ID NO: 558505 - DNA, 201 bp, Homo sapiens
gagtccctatgctgaccccaatacttgcagaggtgagagaatgctctttggttgtgctacaagtgcccaaggcccaacagtccttttctctacagcttctsctctccttgcaggtgattctggcggccccttgatagttcacaagagaagtcgtttcattcaagtgagtcctccctttcctatctggggagatgccaagtg

SEQ ID NO: 558506 - DNA, 201 bp, Homo sapiens
ggccagaggcaggaagctgcccacaaagaggtggtacctactctcctacttcaggaggggagaagcgggacctggagatagaagtagtcctatttcacccyaactacaacattaatgggaaaaaagaagcaggaattcctgaattttatgactatgacgttgccctgatcaagctcaagaataagctgaaatatggccaga

SEQ ID NO: 558507 - DNA, 201 bp, Homo sapiens
taccctggaaacccatgatcccccgtctctttggtcactgtatccctgacactcccagacatttgacctcatttctgactctcccagactccttcatgtaygacacccctcaagaggtggccgaagctttcctgtcttccctgacagagaccatagaaggagtcgatgctgaggatgggcacggcccaggtttgaagacag

SEQ ID NO: 558508 - DNA, 201 bp, Homo sapiens
taacactatacccatggttggggccctgaatgtgactcatagctggctgttcatctctcctgtgacccttcataaggaattcttcctaagccctgtgatcractatctctaacccttcctcaacttgctcaccctgccatgtgtatccctgcctttagccagtttatcttccttatctcctaccctcatggtcctgtctct

SEQ ID NO: 558509 - DNA, 201 bp, Homo sapiens
cccagactccttcatgtacgacacccctcaagaggtggccgaagctttcctgtcttccctgacagagaccatagaaggagtcgatgctgaggatgggcacrgcccaggtttgaagacagagaagggaggcagggcagggaactgggggaaaatggagaagggacagaactgttaatgctggagcctgagccactctcctgg

SEQ ID NO: 558510 - DNA, 201 bp, Homo sapiens
cattcctccttctctacctcagtgtcactattcttgtttcctggcactgttcacttaaccttagaatcacagagctctgagcacttcagagatctttctayagtcctacatttgacacgtggaaacagaagccaaaggaggtcaagggacagcaagttagcaacaagggtgggcttgaaaacagccaggcctctgacagct

SEQ ID NO: 558511 - DNA, 201 bp, Homo sapiens
aagagacaagtggggcatgagagggaggtgcaataggaagagatgatgcctggcccagaacctagctctagaagggcttaggggacatctactgagtgacraaggcaatggggagatgacagtggtgggagcagctgaagtgacgcagtctattcgtccagaggaagagctgctccctgcacaggatatcaaagctctgtt

SEQ ID NO: 558512 - DNA, 201 bp, Homo sapiens
gcagagcctgcctcaccttaggaccgcatgtcttgcctgcgtgtgtcaagaacgaggctgagctgggtccctagtctgattcctttaggtcagctaagacrcaagcaggaacagccatgcttccaggattaggaattctactgaatgatccatggcaccccactgcctctgcaggttggtgtaatcagctggggagtagtg

SEQ ID NO: 558513 - DNA, 201 bp, Homo sapiens
actatacccatggttggggccctgaatgtgactcatagctggctgttcatctctcctgtgacccttcataaggaattcttcctaagccctgtgatcaactrtctctaacccttcctcaacttgctcaccctgccatgtgtatccctgcctttagccagtttatcttccttatctcctaccctcatggtcctgtctcttctg

SEQ ID NO: 558514 - DNA, 201 bp, Homo sapiens
aaggaattcttcctaagccctgtgatcaactatctctaacccttcctcaacttgctcaccctgccatgtgtatccctgcctttagccagtttatcttcctwatctcctaccctcatggtcctgtctcttctgcaggattgcacaacatgggcggggacccaattactgtcattgatgagatccgggacttgctatacattg

SEQ ID NO: 558515 - DNA, 201 bp, Homo sapiens
agaggtggtacctactctcctacttcaggaggggagaagcgggacctggagatagaagtagtcctatttcaccccaactacaacattaatgggaaaaaagmagcaggaattcctgaattttatgactatgacgttgccctgatcaagctcaagaataagctgaaatatggccagactatcaggtgagagcgtccagatccc

SEQ ID NO: 558516 - DNA, 201 bp, Homo sapiens
tcccttcctgctgtctccagcatccctccttggccttttggggccaggcttcatcagcctttctcttcaggtgtgaccaccactccatggtctttggcctrgccccagggatcctgctctctggagggggtagagatcaaaggcggctccttccgacttctccaagagggccaggcactggagtacgtgtgtccttctggc

SEQ ID NO: 558517 - DNA, 201 bp, Homo sapiens
aggaaacaaatacccgtggtctttccctttctccttttgggcctttgctccccatagactcctacccaaaaggctgctgccatttgggaatgaagtgttcmgagttttcagcacattctccttctctgccagatgaaagccagtctctgagtctctgtggcatggtttgggaacacaggaagggtaccgattaccacaagc

SEQ ID NO: 558518 - DNA, 201 bp, Homo sapiens
tgggacttctgcagtttctgtttccttgactggcagctcagcggggccctcccgcttggatgttccgggaaagtgatgtgggtaggacaggcggggcgagscgcaggtgccagaacacagattgtataaaaggctgggggctggtggggagcaggggaagggaatgtgaccaggtctaggtctggagtttcagcttggaca

SEQ ID NO: 558519 - DNA, 201 bp, Homo sapiens
cctcagatgtctatgtgtttggggtcgggcctttggtgaaccaagtgaacatcaatgctttggcttccaagaaagacaatgagcaacatgtgttcaaagtyaaggatatggaaaacctggaagatgttttctaccaaatgatcggtagggagatacaagggaataaagaacacaactctcctcaggttcccctgaagtaat

SEQ ID NO: 558520 - DNA, 201 bp, Homo sapiens
actgaatgatccatggcaccccactgcctctgcaggttggtgtaatcagctggggagtagtggatgtctgcaaaaaccagaagcggcaaaagcaggtaccygctcacgcccgagactttcacatcaacctctttcaagtgctgccctggctgaaggagaaactccaagatgaggatttgggttttctataaggggtttcct

SEQ ID NO: 558521 - DNA, 201 bp, Homo sapiens
aaatctccaggtcctattctgtcctccttcccttttacttgaagcagtttcttgactggtaattcctccatgaacctcagcccttgagcctcttactgagrgcctccctgtcccagcaaagtcgctgaaatctcccaatcacagtattctattttcaatgccatggcgccttgttctcctcacccacaggtggcaagttat

SEQ ID NO: 558522 - DNA, 201 bp, Homo sapiens
agggaatggtgggaggttcactttggggtcaggaggttcagggtggagggggtcatgagactaccttgagggcgacagggaggaccactttgtagtcaaargttgaacagcaggatcgttgggcaatggaggttagtgggaacctgttgggggctggaagggccactttgtggtcaaagggaagtccgtgtaatgatgatt

SEQ ID NO: 558523 - DNA, 201 bp, Homo sapiens
acaaagaggtggtacctactctcctacttcaggaggggagaagcgggacctggagatagaagtagtcctatttcaccccaactacaacattaatgggaaaraagaagcaggaattcctgaattttatgactatgacgttgccctgatcaagctcaagaataagctgaaatatggccagactatcaggtgagagcgtccaga

SEQ ID NO: 558524 - DNA, 201 bp, Homo sapiens
ttcccttcctgctgtctccagcatccctccttggccttttggggccaggcttcatcagcctttctcttcaggtgtgaccaccactccatggtctttggccyggccccagggatcctgctctctggagggggtagagatcaaaggcggctccttccgacttctccaagagggccaggcactggagtacgtgtgtccttctgg

SEQ ID NO: 558525 - DNA, 201 bp, Homo sapiens
tagctggctgttcatctctcctgtgacccttcataaggaattcttcctaagccctgtgatcaactatctctaacccttcctcaacttgctcaccctgccaygtgtatccctgcctttagccagtttatcttccttatctcctaccctcatggtcctgtctcttctgcaggattgcacaacatgggcggggacccaattact

SEQ ID NO: 558526 - DNA, 201 bp, Homo sapiens
cttccaggcagccctggaagtcaagagaacactcagaaatggggagggagaagcagtggaaatccatatgggttgaggagtaggtaagatgctgcttctgygggactgggaatgcgctgtttctcagtgacatggtctccgagaccaggagggatacacctaaggcagcctttccctcttgatgacttctacttgtccccc

SEQ ID NO: 558527 - DNA, 201 bp, Homo sapiens
ttggaagaccaggtgaggtgatggtctcttccctctccacagaccacaagttgaagtcagggactaacaccaagaaggccctccaggcagtgtacagcatkatgagctggccagatgacgtccctcctgaaggctggaaccgcacccgccatgtcatcatcctcatgactgatggtcagaagggacctctctcctgtccca

SEQ ID NO: 558528 - DNA, 201 bp, Homo sapiens
ggacatctcagaggtggtcacccctcggttcctttgtactggaggagtgagtccctatgctgaccccaatacttgcagaggtgagagaatgctctttggtygtgctacaagtgcccaaggcccaacagtccttttctctacagcttctcctctccttgcaggtgattctggcggccccttgatagttcacaagagaagtcg

SEQ ID NO: 558529 - DNA, 201 bp, Homo sapiens
gggtaggggaggtgctccatgtgaagacagagtccttggcacccccactgtgtctcctgggagatgacccaacatcctcatttgaaaccgtccagatcaaygttatccccacctctgatgattcctcaggtaataaaacagcctgcccccaatccttggctctactacgggagaatgtgttatgtgtgtgtgtgtatgtgt

SEQ ID NO: 558530 - DNA, 201 bp, Homo sapiens
ccttctcctcgacactcttcctgactaatgtatctctggaatgccccacataggcttttataggagaggaggtcctggaagtgaagacagagtccctgtcsccttcaggatgcctcctgtgggatgtcccagccccctcacttggagctgtccagatcagcatgggcccatcccttgatggctcctcaggtaatggagtct

SEQ ID NO: 558531 - DNA, 201 bp, Homo sapiens
gtgaggttcagttgtggggtgggtggtgagctgctgcatattttttattttgtttctctagtgttatggcagtggaggtgggaatttagtccccaggtggracaagggaagttttttcattttggagctagttactgggagtaagggagggtggggtgggggggagttcaggtttatgtgtgtgcatttcttttttattat

SEQ ID NO: 558532 - DNA, 201 bp, Homo sapiens
ttccgtcaactctgaggcctccctgctctcagccgactcctccagccaggtgagcaccaccttccttccttcctccaggttttccagtgagttcctcctgrcctagaggtatgagagctttcccttcttcagctccttctcctcgacactcttcctgactaatgtatctctggaatgccccacataggcttttataggaga

SEQ ID NO: 558533 - DNA, 201 bp, Homo sapiens
ttcaggttcaaagagaaaggacccatttccccatcttaaccctcttttttatttttttgagatggagttttgctcttcttgcccaggctggagtgcaatgrcgcgatcttggctcactgcaacctttgcctcccaggttcaagcgattctcctgcctcagcctcctgagtatctgggacacagggatgcgccaccatgccc

SEQ ID NO: 558534 - DNA, 201 bp, Homo sapiens
tcctgagtatctgggacacagggatgcgccaccatgcccgactaattttgtatttttagtagagacggggtttctccatgttggtcaggctggtcttgaaytcctgacctcaggtgatctgcccgccttggcctcccaaagtgctgagattacaggcgtgagccaccatgcccagcctcccatcttaaccctcttaaccct

SEQ ID NO: 558535 - DNA, 201 bp, Homo sapiens
accccggagacacttgctggggttctcagagcaagagccagttcagggagttgaacctctccaggggtcctcccagggccctaaggagccccagcccagcsccacagaccagcccagtttcaggtgaggagagagagagagggccccctctcgtttgagggtatgagttggtcttctccccgctttcagtgagggggaccc

SEQ ID NO: 558536 - DNA, 201 bp, Homo sapiens
accagaatgtcaaataattgatggcttgtaagccctaaacttctaaagcttttgttctcgctcttactgtcaacatctcccttgttttttgcccttctttytgccccctgccccacaccaactctcacccaggctcttggggtaggggaggtgctccatgtgaagacagagtccttggcacccccactgtgtctcctggga

SEQ ID NO: 558537 - DNA, 201 bp, Homo sapiens
gaagatgattctagtggcaaagtagagaatgggttgcagaggggcagggccagaggcaagagaaccaaggaagaagcttatgcagttgatcaagtaagatrttcggatgtcatgaagaaagcagacttgagaaagaatgaagtggaatagatgagttgtgacctcctggacattggagagaggtaggagtcaaagaggttt

SEQ ID NO: 558538 - DNA, 201 bp, Homo sapiens
aaccctcatcttcccactgtttcccagaaactacgtagcttcctatatcctcacgcttctacataagtgcctatcctctctccttcaatcccctatttttktttcttctcccttgctgcggtacaggaatccccaccgacatgtccttgggtactttttggactcttcttaagctctgcttcctgataatttctaactccc

SEQ ID NO: 558539 - DNA, 201 bp, Homo sapiens
gaaagagtcaactgattagttggtgatggggagaggcgggccttgggaaccgtctcctggttggggggtgggggggaaagatggcggagctgatgctgctyagcgagattgctgacccgacgcgtttcttcaccgacaacctgcttagcccggaggactggggtctgcagagtgaggcaccggggaggggagagggctgtg

SEQ ID NO: 558540 - DNA, 201 bp, Homo sapiens
tcttggcctggcatggaggtcctgagctcctccatttccccaggcttgctgacgagttgagtggctgggtccagcgccaccagagaggccggaggaagatycctcagagggcccaggagagacaggtagggcgggtggctggttcaaggaaggccacttgaagacaagggctaaaggccttgtctggggatttctagtggg

SEQ ID NO: 558541 - DNA, 201 bp, Homo sapiens
gcccccttttttgaaagagtcaactgattagttggtgatggggagaggcgggccttgggaaccgtctcctggttggggggtgggggggaaagatggcggasctgatgctgctcagcgagattgctgacccgacgcgtttcttcaccgacaacctgcttagcccggaggactggggtctgcagagtgaggcaccggggaggg

SEQ ID NO: 558542 - DNA, 201 bp, Homo sapiens
gaaggatttggggagtgatgtggaactgcaggggctacagggccaggtggggcccctgctaaggggctcttagcttttatcctgtggataggtgggggccwttggagaattaagcagggaagtaatatgattaggaagatgattctagtggcaaagtagagaatgggttgcagaggggcagggccagaggcaagagaacca

SEQ ID NO: 558543 - DNA, 201 bp, Homo sapiens
gttatctagcagtgaagatttttttgtttgtttgttttttgttttttgcttttttttgagatagggcctccctctgtcacccaaactacagtgtagtgacrgggtcacagctcactgtagccttgacctcctgagctcaggtgatcctcctgcctcagcctcctgagtagttgggaccacagacacatgccaccatgtctg

SEQ ID NO: 558544 - DNA, 201 bp, Homo sapiens
caatagtggtgtgatcttggctcactgtaatctctgcctcctgggttcaagcgattctcctgcctcagcctcctgagtagctgggattacaggcatgctcyaccacgcctggctaattttgtatttttagtagagacagggcttctttcatgttaggctggtcttgaattcccgacctcaggtgatccacccactttggct

SEQ ID NO: 558545 - DNA, 201 bp, Homo sapiens
ctcccaaagtgctgagattacaggcgtgagccaccatgcccagcctcccatcttaaccctcttaacccttcagtgtttacatgatatccagcttttgcctmatcctgcctcccacagatgtccagaccaagatagaacctgtctctccatgttcttccgtcaactctgaggcctccctgctctcagccgactcctccagcc

SEQ ID NO: 558546 - DNA, 201 bp, Homo sapiens
tcttcccacactctaacctttcccacctctgaggagcagtagcagggaatgtttgaaagaagggccccttccctagcgtgtttgagtagagaggaaaaacstctctggctatgtaggtgggtcaggaaggcaggggaatggccatgtgagctttgggtaaatcattccttggggtttgagagcatagtctccttctgccaa

SEQ ID NO: 558547 - DNA, 201 bp, Homo sapiens
ccataaattaaaggcaaggaagtcgtactgtactatacgactacggtcatggccatagttggggagggaggctgcctcctaggggaaaatcaggtaaactrtataagcagtataacaaggttaaactttgaaccctacaaatgtgggctgacaggaagaaagagttacgaaggaaagagtttccaccagcatggagaaagt

SEQ ID NO: 558548 - DNA, 201 bp, Homo sapiens
gaggagcagacgcagctcttccgttgcccggagcaggatgtcccggtattgtgtccccagcctttctctaacccttggtgggtggaaagtgagcccagaayctggacccattcacaggccataactcatctggagtcacccctactttctcatcctttctcacactcctgccctcttgtatcctcccttatttagtttgac

SEQ ID NO: 558549 - DNA, 201 bp, Homo sapiens
tcaatggacatgagacatagttcttgcttttggagagttttgtgagggttataatacatcatggttaaatagttcccttttttttttttttttttttttttgagacagagttttgccctgtcacccaggctagagtgcattggcgtgatctccactcactgcaacctccgtttcctgggtttaagctattgtcctgcctca

SEQ ID NO: 558550 - DNA, 201 bp, Homo sapiens
ccaggggtcctcccagggccctaaggagccccagcccagccccacagaccagcccagtttcaggtgaggagagagagagagggccccctctcgtttgaggrtatgagttggtcttctccccgctttcagtgagggggacccaaagctttctcttgccgtcatcgccttctttgttgtgggagtgctgggcagtctccaagt

SEQ ID NO: 558551 - DNA, 201 bp, Homo sapiens
gtgtgggggttaagcacttatttgaggtgggggtgttcacctctcttctcatcccttttcagaatatagggctcctctcattcctgtgaacccccagtccyggcttctttgtttgaggggattgtgtgaggttcagttgtggggtgggtggtgagctgctgcatattttttattttgtttctctagtgttatggcagtgga

SEQ ID NO: 558552 - DNA, 201 bp, Homo sapiens
cactgttgttgcccaggctggtctcgaactcctgagctcaggcagtctgcccacctcagcctcccaaagtgctaggattacaggcttgagccacctcgccyggcctcctgctccattatttttccagtggagagtagatgatggtgataatgctggtagaaatagtgactattaagtgcttactgagttctaggctctagg

SEQ ID NO: 558553 - DNA, 201 bp, Homo sapiens
aatacaggtgtggtcattctaggatagaaatcactagaggtggggctgggtgtggtggctcatgcttgtaatcccagcactttgggaggccgaggtgggcrgatcacgaggtcaggagattgagaccatcctggctaagatggtgaaaccccgtgtctactaaaaatacaaaaaattagcctgtagtcccagctacttggg

SEQ ID NO: 558554 - DNA, 201 bp, Homo sapiens
tttggagctagttactgggagtaagggagggtggggtgggggggagttcaggtttatgtgtgtgcatttcttttttattattattaaataaacaacttggrgggagttgaaggaatggtggctgccttcctggctcgtgatggggagtttgggggaaagtggcttttccagagccagcatcaaagaatcaagcactgaaga

SEQ ID NO: 558555 - DNA, 201 bp, Homo sapiens
cccagccatcatttatttatttatttattttttgagaccgagtcttgctctgccacccaggctggagtgcagtggcgtgatctcggttcactgcaacctcygcctcttgggatcaagctattttccttcctcagcctcctaagtagctgggattacaagcacgcgccaccacacctggctaatttttatagttttagtaga

SEQ ID NO: 558556 - DNA, 201 bp, Homo sapiens
ccatgtgctgtggtgactgaccaccacgccctaagatttactccagaattcccctccacaaagcaccatcctttttatcctttttttttttttttttttttgagatggagttttgttctttttgcccaggctggagtacagtggcacgatctcggctcactgcaacctccgcctcccaggttcaagcgattctcctgcctc

SEQ ID NO: 558557 - DNA, 201 bp, Homo sapiens; identical to SEQ ID NO: 409352

SEQ ID NO: 558558 - DNA, 201 bp, Homo sapiens
gtgcagtggcgtgatctcggttcactgcaacctccgcctcttgggatcaagctattttccttcctcagcctcctaagtagctgggattacaagcacgcgcsaccacacctggctaatttttatagttttagtagaaacagagcttcaccatgttggccaggctggtcttgaactcctgatctcagatgatctgccggcctc

SEQ ID NO: 558559 - DNA, 201 bp, Homo sapiens; identical to SEQ ID NO: 409354

SEQ ID NO: 558560 - DNA, 201 bp, Homo sapiens
acactcctcacctctggctactttggaactcatcccccgaaacctccaggtaccagacaagaaagttccccagaagtaaggggagaaagtcattcccttayaggatctctgtcctgtaggcccgtatgcctttgctatggcatctcctcctaggaggagaggatgctgggaacagggtgggtggaggaaagtcccctgagg

SEQ ID NO: 558561 - DNA, 201 bp, Homo sapiens; identical to SEQ ID NO: 409357

SEQ ID NO: 558562 - DNA, 201 bp, Homo sapiens
gctcggcgtgagatcttgtcccctctgcgttttgagccatacaaagcagtggccctggcctcaggaggagaggtgatcttcaccaaagaccagcacattcragacgtggcagccattgttggggagagcatggctgccctggtaagtgggggccagggccctcacttaggaactgaagggtggtcaggctgcacctctctt

SEQ ID NO: 558563 - DNA, 201 bp, Homo sapiens
cccagttttatatatatatataaaatatataatatataatatatatattatatatataatgtatatatgtatacatacatctgtgcatatgcataacttttatattgagttataatttacataatgtgcactaaagtgtacagtttgatggatttcatataatacacccagttcaggatatagaacatttccagcacccca

SEQ ID NO: 558564 - DNA, 201 bp, Homo sapiens
ccccatggaggatggaccccaccctggcctctaccccctgactcagccagttgcaggtacatttattccctgagcccccacccacctaacccccagttttwtatatatatataaaatatataatatataatatatatattatatatataatgtatatatgtatacatacatctgtgcatatgcataacttttatattgagt

SEQ ID NO: 558565 - DNA, 201 bp, Homo sapiens; identical to SEQ ID NO: 409359

SEQ ID NO: 558566 - DNA, 201 bp, Homo sapiens
gctattttcacttcttttgtggatcttcagttgcttcaggccatctggatgtataagtgccagtcacaggggatatgattggttagcttgggctcagaggmctgacacctccctcatcctgcctaactcccagagttgaaatgatgatcaaataaaatgcctactggactgagagttgcctaaatttgagtcttatttgcc

SEQ ID NO: 558567 - DNA, 201 bp, Homo sapiens
gaagtttctcttcctcttagatccatgactagccacttctttttttttttttgagatggagtcttatggtcacccaggttggagtgcagtggcacaatctyggctcattgcaacctccacctcccgggttcaagggattctcctgcctcagcctcccaagtcgctagagttaccagtgcccaccaccaggcctggctaatt

SEQ ID NO: 558568 - DNA, 201 bp, Homo sapiens
aattaataaaaattatgtgtgggtgtggtggcacatgcctatagtcccagctacttgggaagctgaggcaggaggatcacttgagcccaggagactgaggytgcagtgagccgtgatggcactactgcactccagagcggcctgggtgacgcagtgagaccctgtctctaaaaaaaaaaaaaaagataactagcagacttg

SEQ ID NO: 558569 - DNA, 201 bp, Homo sapiens
aaaatacaaaattagccgggcgtggtggtgggcacctataatcccagctactcgggaggctgaggcaggagaatcgcttgaacccaggaggcagaggttgyggtgagccccgagatcgtgcctttgcactccagcctgggcaacaagagcaaaaagctctgtcacaaaaaaaaaaaaaaaaaaaaaaaaaaaaaagaaaag

SEQ ID NO: 558570 - DNA, 201 bp, Homo sapiens; identical to SEQ ID NO: 409365

SEQ ID NO: 558571 - DNA, 201 bp, Homo sapiens; identical to SEQ ID NO: 409366

SEQ ID NO: 558572 - DNA, 201 bp, Homo sapiens
cccttggagcccgtgggacctccggagcgaggtctcctcgcagcctcgctgtcgcccacgctgctgtccacccctagacccttctccctggagctgattgkccaggacgcagcggggcggcgcctgcacagggctgcccctcagcctagcactgtagtccctgtccttctggaggtgagacgccaggggaaagtgcggctg

SEQ ID NO: 558573 - DNA, 201 bp, Homo sapiens
ggctggggctggagagagttagagcggccccttccctgaagaacccttctctgcagcttagtggcccctcgggtttcttggccccgggcagcaaagtcccrctcagtctccgcatcgccagcttctcgggccctcaggatcttgaccttaggactttcgtcaaccccagcttctccctcacctccaacctctccaggtgag

SEQ ID NO: 558574 - DNA, 201 bp, Homo sapiens
agcgacgcctatatcctctctccagggctcacctggaactgaatgagtcggcctggggccgcctgtggctggaggtcccagattcagcggccccggattcygtggtgatggtgactgtgactgcagggggacgagaagccaacccagtacccccgactcatgctttcctccggctcctggtatcggccccagccccgcagg

SEQ ID NO: 558575 - DNA, 201 bp, Homo sapiens
tccggagcgaggtctcctcgcagcctcgctgtcgcccacgctgctgtccacccctagacccttctccctggagctgattggccaggacgcagcggggcggygcctgcacagggctgcccctcagcctagcactgtagtccctgtccttctggaggtgagacgccaggggaaagtgcggctggggctggagagagttagagc

SEQ ID NO: 558576 - DNA, 201 bp, Homo sapiens
ggtgactgtgactgcagggggacgagaagccaacccagtacccccgactcatgctttcctccggctcctggtatcggccccagccccgcaggtgaggaacyactactttccatcacagggtgggcaaggccggggagggtggtgtaggtttaatttgagtacagctctagcacaccctgtcattctcttccttttccccac

SEQ ID NO: 558577 - DNA, 201 bp, Homo sapiens
gggtcccagagggtgccgaactaggccaggtgcccttggagcccgtgggacctccggagcgaggtctcctcgcagcctcgctgtcgcccacgctgctgtcmacccctagacccttctccctggagctgattggccaggacgcagcggggcggcgcctgcacagggctgcccctcagcctagcactgtagtccctgtccttc

SEQ ID NO: 558578 - DNA, 201 bp, Homo sapiens
gagatgtgcctgtcagccctgcaggtctggcccctcccttcttccccgtttcctggccccaccaccagggggagctagatccctcctggggctccccaccwccttcagcacctagatccactagcttcactgtagggttcccgggccatattcccttctgcttcatcctccgtggctctacccattcccctcctactgcca

SEQ ID NO: 558579 - DNA, 201 bp, Homo sapiens
tgtggcgcaggctgctctgcccgccttagcctcctaaagtgctgggattacagtcgtgagccaccgcacccagcctgtgctgtgttttccagcacagcccyagtttcaaacattcaggctcactgcgggcccatgatcctaggttttagttcagaaagctttgctagggaacttctgggtgttcgcctcatcccagctggg

SEQ ID NO: 558580 - DNA, 201 bp, Homo sapiens
ccaccagggacacctaggtctgccctgccctgccccgccctgccccgccctgcactgacaagtatgactttttttttttttttttgagatagagtctgtckccagactggagtgcagcggcacgatctcggctcactgcaacctctgcctcccgggttcaagtgattctcctgcctcagcctccccagtagctggggaggc

SEQ ID NO: 558581 - DNA, 201 bp, Homo sapiens
ttcactgtgttggccaggctggtctcgaactcttgaccttgtgatccacccgcctcagcctcccaaagtgctgggattacaggcgtgaccaactgcgcccrgcccaatgacgtggtttctttctatctcccctttcttctttgttcctcatcccatacctcatcttcttccccattttctggtcctgccaatccctcaagg

SEQ ID NO: 558582 - DNA, 201 bp, Homo sapiens
cctcccccaaggatgcctttctcaccaaccaggtggaatccctgactcaggagcggcgctgccgggtgagcagagctagtgggagacccagtgttagcctyccagggatgtgagagaccctgtgatgacaatctcataacgagggttgcaccacactatggtggcccaacaagccttggtatatggtgggagaagcagaca

SEQ ID NO: 558583 - DNA, 201 bp, Homo sapiens
cacactcctcacctctggctactttggaactcatcccccgaaacctccaggtaccagacaagaaagttccccagaagtaaggggagaaagtcattcccttrcaggatctctgtcctgtaggcccgtatgcctttgctatggcatctcctcctaggaggagaggatgctgggaacagggtgggtggaggaaagtcccctgag

SEQ ID NO: 558584 - DNA, 201 bp, Homo sapiens
agtggaggccaccttcccaccagggacacctaggtctgccctgccctgccccgccctgccccgccctgcactgacaagtatgactttttttttttttttttgagatagagtctgtcgccagactggagtgcagcggcacgatctcggctcactgcaacctctgcctcccgggttcaagtgattctcctgcctcagcctccc

SEQ ID NO: 558585 - DNA, 201 bp, Homo sapiens
ctgcccctgtccccctccgactggccctcagaatcctcctctccgctcccgtgcccctgcaggcgtcccgactctaggctctgggcagcctggagctttakcgacgcctatatcctctctccagggctcacctggaactgaatgagtcggcctggggccgcctgtggctggaggtcccagattcagcggccccggattccg

SEQ ID NO: 558586 - DNA, 201 bp, Homo sapiens
gggtgggtggaggaaagtcccctgaggaggctgtggtggggttgaggtaggggagcaacttcttcctccgctgataggatttctcccttgtcataggcagytttgggggactggctggagggatcaggggatccaccatgtgctgtggtgactgaccaccacgccctaagatttactccagaattcccctccacaaagcac

SEQ ID NO: 558587 - DNA, 201 bp, Homo sapiens
ggccaccttcccaccagggacacctaggtctgccctgccctgccccgccctgccccgccctgcactgacaagtatgactttttttttttttttttgagatrgagtctgtcgccagactggagtgcagcggcacgatctcggctcactgcaacctctgcctcccgggttcaagtgattctcctgcctcagcctccccagtag

SEQ ID NO: 558588 - DNA, 201 bp, Homo sapiens
gagtttgagaccagcctgactaatatggagaaaccccgtctctactaaaaatacaaaattagccgggcgtggtggtgggcacctataatcccagctactcsggaggctgaggcaggagaatcgcttgaacccaggaggcagaggttgtggtgagccccgagatcgtgcctttgcactccagcctgggcaacaagagcaaaa

SEQ ID NO: 558589 - DNA, 201 bp, Homo sapiens
gggtttcatcatgttggccaggcttgtctcaaactcctgacttcaggtgatccacccacctcagcctcccaaaatgctgggattactggtgtgagccaccrtgcccagccatcatttatttatttatttattttttgagaccgagtcttgctctgccacccaggctggagtgcagtggcgtgatctcggttcactgcaacc

SEQ ID NO: 558590 - DNA, 201 bp, Homo sapiens
aggctgaggcgggcggatcacctgagtcaggagttcgagaccagcctggccaacatggtgaaacctccgtctctattaaaaatacaaaaattagccgagartggtggcatgcacctgtcatcccagctactcgggaggctgaggcaggagaatcgcttgaacccgggaggcagaggttgcagtgagccgagatcgcgccac

SEQ ID NO: 558591 - DNA, 201 bp, Homo sapiens
cccctctctactaaaaatacaaaaaattagctgggcgcggtggcgggcgcctgtaatcccagccacttgggaggctgaagcaggagaatcgcttgaactcrggaggcggaggttgcagcgagccgagattgcgctactgcacttcagcttgggcgacagcaagactccgtctcaaaacaaagaaaaaagattaaaaaaaaa

SEQ ID NO: 558592 - DNA, 201 bp, Homo sapiens
ggtgcacacaggctgaatttcagccctctctgtgcagcaaacgatctgcacaagcacctaggaacaggtccctaaggagcgagtgacctgtggagacctcrtgtgatcatgctttccttgactcccctctgggtacctggctacatcggggcaaccccagtatgtgctctgggcatccaacatcagctcccccggctgtga

SEQ ID NO: 558593 - DNA, 201 bp, Homo sapiens
tttttagtagagatggggtttcaccgtgttagccagcatggtctcgatctcctgacctcgtgatccgcccgcctcagcctcccaaagtgctgggattacasgcgtgagccaccgcgcccggccggggtcagccccttgagaagatggacagctggggcggtgccggttaacagctttgtctccctgcagggctgtgggaca

SEQ ID NO: 558594 - DNA, 201 bp, Homo sapiens
gccagggcagtgggtgagggacaggaacccagggagggaccattcccataactgccccactaagtccctgccctccaatgactcatctgtgcctctgtctrcagcctggttgtatggagacccccggcaagtcctctaccccaggaactctactggggcctactgtggcatgggggagaacaagtgagtacaaaggcgaga

SEQ ID NO: 558595 - DNA, 201 bp, Homo sapiens
tcagggtttgccagtctcctcctaagcgactgacatgcattttttccgctaattcttatcatcgctctatgcaacataatattcccgaccccacttcacakgaggaaactgagattacataacctgcccgggggtaagggtggtggtgcagcttggattccaaatcccgcaggcagcttgcctcccagtccccgatttcct

SEQ ID NO: 558596 - DNA, 201 bp, Homo sapiens
ggataattataatacccatccctggggtggctgagaagatgaaatgactttgggcacataaagtgcttagtacaatgcctggcacctgataagagctcaayaacaggttgaattgtattatattgttaagtcttactcccttggaacacagagccctaggtagtagccaggtgggactccctgcgggggacccgagagaga

SEQ ID NO: 558597 - DNA, 201 bp, Homo sapiens
tacattctaggtgaagagattagagttgttcacaaagagactgtatgaaaatctcatgaaaacatacatgggtgaatctacacacacattttttttttttwgacggagtcttcctctgttgcccaggctggagtgcagtggcgtgatctcggctcactgcaacccccgcctcccgggttcaagcgcttctctgcttcagcc

SEQ ID NO: 558598 - DNA, 201 bp, Homo sapiens
ctaatttttatttttattttatttattaaatttatttattaaatttgtatttttagtagagacggggtttcactatcttggccaagctggtcttgaactcytaacttcgtgatccacccaccttggcctcccaaagtgctgggattacagacatgagccaccacgcccagcctgcacacatatcatttttatatatgcaca

SEQ ID NO: 558599 - DNA, 201 bp, Homo sapiens
cctgggacctgcctctaccccagatctcacccagggtctcaggttccagccccttagtgttctctctgcacccaggtgtgtgtgtcctcctgcccggaggwcccatggactgtgggaaaaaacgagttctcacagactgttggggaagtcttctatacaaaaaacaggaacttttgtctgccaggggtaccctggaatatg

SEQ ID NO: 558600 - DNA, 201 bp, Homo sapiens
ccgagatggtgccactgcactccagcctgggcaacagtgagactccatctcaaaaaaaaaaaattagacaatttatagcataagatgagatatccagttaycaatttaagtacagtaaggagtatctcaagtgaatacttcaaagtcaagtagatctgaatataaattctagcactttccagccctatggtcttgacccaa

SEQ ID NO: 558601 - DNA, 201 bp, Homo sapiens
agtagatctgaatataaattctagcactttccagccctatggtcttgacccaactatgcaacctctctgaaccttgtttcctcatctttagaatgtaaatracagtgaggtgcagtggctcacgcctgtagtcccaactgctcaggaggctaaggcgggagggtcacttgagtcctggagttggaggttacagtgagctat

SEQ ID NO: 558602 - DNA, 201 bp, Homo sapiens
tggctctggtcttgagcctactgtttatcttgcttctgcgcctggtggctgggcccctggtgctggtgctgatcctgggagtgctgggcgtgctggcatayggcatctactactgctgggaggagtaccgagtgctgcgggacaagggcgcctccatctcccagctgggtttcaccaccaacctcagtgcctaccagagcg

SEQ ID NO: 558603 - DNA, 201 bp, Homo sapiens
gtttcaccaccaacctcagtgcctaccagagcgtgcaggagacctggctggccgcccgtgagtgtcctgcccacccccaagccaccagctgcccaaggacygccctgggccatgcccggccccagccctggccctgacctaggtctgtctgccccatcctctgcagtgatcgtgttggcggtgcttgaagccatcctgctg

SEQ ID NO: 558604 - DNA, 201 bp, Homo sapiens
agggtgacagggtgttctaagagttgaggccagcggagaggagggtccaaaccaaggcacgacagggaggggaggcaggggatagactgggctccacaggrcagaagcccatttgtgaaatcaaaagcagcccactgagggatgcaaggcccatcacccttccctcccctaagggcactgtggactgggagggggccagag

SEQ ID NO: 558605 - DNA, 201 bp, Homo sapiens
gccgagagtggtggcatgcacctgtcatcccagctactcgggaggctgaggcaggagaatcgcttgaacccgggaggcagaggttgcagtgagccgagatygcgccactgcactccaacctgggtgacagactctgtctccaaaacaaaacaaacaaacaaaaagattttattaaagatattttgttaactcagtaaatct

SEQ ID NO: 558606 - DNA, 201 bp, Homo sapiens; identical to SEQ ID NO: 409318

SEQ ID NO: 558607 - DNA, 201 bp, Homo sapiens; identical to SEQ ID NO: 409319

SEQ ID NO: 558608 - DNA, 201 bp, Homo sapiens; identical to SEQ ID NO: 409320

SEQ ID NO: 558609 - DNA, 201 bp, Homo sapiens
gtaagaggaagcaggggacatggaggcgggactagtaggggtgaggggctgtaggggccacattcctcattgtgcagagaagactgaggccacagagggcragacacttgtgcaaggtcacacactcaacccccagcagagctagaagaaaccagttcccagaatacctggtactcctgttgagccatccatcatgtgggg

SEQ ID NO: 558610 - DNA, 201 bp, Homo sapiens
ggagtgcagcagtgcaatctcagctcactgcaacctccatcccccaggctcaagcaatcttcccacctcagcctcctgagcagctggaactactagcgtaygacaccacgccaggctaattttaagctttttgtagaggcaaggtcttgctgtgttacccgggctggtcttgaactcctggggttgccccgatgtagtcag

SEQ ID NO: 558611 - DNA, 201 bp, Homo sapiens; identical to SEQ ID NO: 409321

SEQ ID NO: 558612 - DNA, 201 bp, Homo sapiens
ccacagagggcaagacacttgtgcaaggtcacacactcaacccccagcagagctagaagaaaccagttcccagaatacctggtactcctgttgagccatccatcatgtggggagggaaactgaggctgggagagacagccctggataccaggacttactccacccctccccaggacattgctctgacttgaggaccatcaa

SEQ ID NO: 558613 - DNA, 201 bp, Homo sapiens
gggtcagcccccccctttttttttttgagacggagtctcgctctgtcgcccaggctggagtgcagtggtgcgatgtcagctcactgcaaactccgcctccygggttcacgccattctcctgcctcagcctccggagtagctggcactacaggcgcccgccaccatgcccggctaattttttgtatttttagtagagatggg

SEQ ID NO: 558614 - DNA, 201 bp, Homo sapiens
gattacaggcataagccaccgcacccgcctcataaatttttttttctggagacttttaaggcaaattctggacatcatgccatttcacctgtacatgcatygagatggatctcaacagataagaactgtttaaaagcatagccactatatcattatcacatctcacaaaattaacaataattccttaatatcatcaaatac

SEQ ID NO: 558615 - DNA, 201 bp, Homo sapiens
aggatcgcttgagcccagaagttcaatgttgcagtaagctatgatcatgcagctgcactctagcctgggtgacagagcaagaccttgactcaaaaataagwaaataaataaataaatagataaataaatgacaaagcaaggctgcctggcaaagttgttgcaaggatggcagtaagtggctctgtaggcacataacagttg

SEQ ID NO: 558616 - DNA, 201 bp, Homo sapiens
atcctctaccccctcgcccaatgtctgaaacacaggctttggacagaggaggaggagccagagctccgaatggattccaagaccaacaggatttataaggraaagaggcctaatctggggacattgggtggtgtgtggaaaggcagggagggcctctgtaaggggaaagatttgaggggctagggctgaacctcactgtcc

SEQ ID NO: 558617 - DNA, 201 bp, Homo sapiens
tgggagggggccagagaccctccaggcagagctcctggcccccaacccagcagcccggctctcccttccagctctgggacgctgctttccatggaccaacrttactccaccggcgctcccagggatcaccaatgacaccaccatacagcaggggatcaggtaggcacctccctcccccacatcctggccacaccccttcca

SEQ ID NO: 558618 - DNA, 201 bp, Homo sapiens
ctcccctaagggcactgtggactgggagggggccagagaccctccaggcagagctcctggcccccaacccagcagcccggctctcccttccagctctgggrcgctgctttccatggaccaacattactccaccggcgctcccagggatcaccaatgacaccaccatacagcaggggatcaggtaggcacctccctccccca

SEQ ID NO: 558619 - DNA, 201 bp, Homo sapiens
agaccctccaggcagagctcctggcccccaacccagcagcccggctctcccttccagctctgggacgctgctttccatggaccaacattactccaccggcrctcccagggatcaccaatgacaccaccatacagcaggggatcaggtaggcacctccctcccccacatcctggccacaccccttccacccacagccccatc

SEQ ID NO: 558620 - DNA, 201 bp, Homo sapiens
tgcgtcctcttcctgctcttcattctaggttacatcgtggtggggattgtgggtgagtttccagctgctcagagccagggcagtgggtgagggacaggaamccagggagggaccattcccataactgccccactaagtccctgccctccaatgactcatctgtgcctctgtctgcagcctggttgtatggagacccccggc

SEQ ID NO: 558621 - DNA, 201 bp, Homo sapiens
tagggctgaacctcactgtcctcaccctgcctacagtgccctgggggtggctctggtcttgagcctactgtttatcttgcttctgcgcctggtggctgggmccctggtgctggtgctgatcctgggagtgctgggcgtgctggcatatggcatctactactgctgggaggagtaccgagtgctgcgggacaagggcgcctc

SEQ ID NO: 558622 - DNA, 201 bp, Homo sapiens
ggcgtgctggcatatggcatctactactgctgggaggagtaccgagtgctgcgggacaagggcgcctccatctcccagctgggtttcaccaccaacctcastgcctaccagagcgtgcaggagacctggctggccgcccgtgagtgtcctgcccacccccaagccaccagctgcccaaggactgccctgggccatgcccgg

SEQ ID NO: 558623 - DNA, 201 bp, Homo sapiens
tcacacctgtaatcccagcactttgggaggccgaggcaggtgaatcatgaggtccagagttcgagaccaacctggccaatatggtgacagagtgagactcyatctcaaaaaaaaaaaaaagattttttgattagccaggcatggtggcacacacctgcagtcccagctacttgggaggttgaagcaggaggattgcttgaa

SEQ ID NO: 558624 - DNA, 201 bp, Homo sapiens
gtgtgctgtgctcagtcgggccctagacttagtttagtgctctgctcttgccatcttgaaacgtgaacaattttcattttgcaccagtccccacaaattaygaagccaatttcactctcagcattgccaggcctctcaccctcaacctgccctaacttctggcacagggtggtcgtcctggacaaagtcacagacctgctg

SEQ ID NO: 558625 - DNA, 201 bp, Homo sapiens; identical to SEQ ID NO: 409330

SEQ ID NO: 558626 - DNA, 201 bp, Homo sapiens
ggggctgtgacgtgtgggagggcggggcgggcagcaggtgagacgccaggtctccagggctccaatcactccggagactgagccatggggggaaagcagckggacgaggatgacgaggcctacggtgagactggggcgaggcccgggaccctgtggagggaggggaggacgggtactttgggaatggtgtctggggctggc

SEQ ID NO: 558627 - DNA, 201 bp, Homo sapiens
ggaggtgagatggagctggatttgaacagggagtcatggatgggatttctggtggaaagagagccctgagagagaggcacagtaagagcaaaggtacagaktagaagggaacatgggctggatttggacaggagagcctggaagcctggccagggagtgtggatgctgtctctggggcagagcctctggagatgtctgagt

SEQ ID NO: 558628 - DNA, 201 bp, Homo sapiens
ctgggtcattggcatttggagccctcatcctgacccttgtgcagatagcccgggtcatcttggagtatattgaccacaagctcagaggtgagtctggagtyggagtaggagtcaggagctggggaaggccattagggaggggcagtgaccaaacatgagccttcctcgctcccaggagtgcagaaccctgtagcccgctgc

SEQ ID NO: 558629 - DNA, 201 bp, Homo sapiens; identical to SEQ ID NO: 409331

SEQ ID NO: 558630 - DNA, 201 bp, Homo sapiens
cagggagtcatggatgggatttctggtggaaagagagccctgagagagaggcacagtaagagcaaaggtacagattagaagggaacatgggctggatttgsacaggagagcctggaagcctggccagggagtgtggatgctgtctctggggcagagcctctggagatgtctgagtcacaaagggacccagaaccctggagt

SEQ ID NO: 558631 - DNA, 201 bp, Homo sapiens
cccggacaacaagaagaggaagaagtgacagctccggccctgatccaggactgcaccccacccccaccgtccagccatccaacctcacttcgccttacaggtctccattttgtggtaaaaaaaggttttaggccaggcgccgtggctcacgcctgtaatccaacactttgagaggctgaggcgggcggatcacctgagtca

SEQ ID NO: 558632 - DNA, 201 bp, Homo sapiens
gcctactgatgcccatgctgcagcatcacccaactctctaacccttaacccctccagaccataagccctacctccccaagtctccttagctcagcctcccrtttcgtttctctctcagaagctgcacagatgtcatctgctgcgtcctcttcctgctcttcattctaggttacatcgtggtggggattgtgggtgagtttc

SEQ ID NO: 558633 - DNA, 201 bp, Homo sapiens
ggatcacaaggtcaggagttcgagactagtctggccaacatggtgaaaccccgtctctactaaaaatacaaaaattagccaggtgtggtggtgggcacctraaatcccagctactcgggaggctgaagcaggagaattgcttgagcccagaggcggagtttacggtgagccgagatggtgccactgcactccagcctgggc

SEQ ID NO: 558634 - DNA, 201 bp, Homo sapiens
tacaaaggcgagaagaggagtgcaggagcgaggcgaggtagggtgggcaggagacacccccccaactcaggctccagacctgtccgtgctcttccacagcmtttccctgctgtccccaccccacctcagcctccctgaatctgacaactccaggccacgttaagaaccattgctggacagttagcttcttgagtcccccca

SEQ ID NO: 558635 - DNA, 201 bp, Homo sapiens
ccgtgagtgtcctgcccacccccaagccaccagctgcccaaggactgccctgggccatgcccggccccagccctggccctgacctaggtctgtctgccccrtcctctgcagtgatcgtgttggcggtgcttgaagccatcctgctgctggtgctcatcttcctgcggcagcggattcgtattgccatcgccctcctgaagg

SEQ ID NO: 558636 - DNA, 201 bp, Homo sapiens
ctgggccatgcccggccccagccctggccctgacctaggtctgtctgccccatcctctgcagtgatcgtgttggcggtgcttgaagccatcctgctgctgrtgctcatcttcctgcggcagcggattcgtattgccatcgccctcctgaaggaggccagcaagttagggcctgcctgggagggagatggggttgaggacag

SEQ ID NO: 558637 - DNA, 201 bp, Homo sapiens
ccgatcaggaactgccacacacacctgccaagggatcacgcttgggggtgatcttcccttactccacccgaagctgccccaggtggcttctctgtgacccyagtttcctctaagggtcctgtgagcctgatttattcagttctgtttatccagtgagcacctacagtatgcctagccctgcaccaggccctgaggacacag

SEQ ID NO: 558638 - DNA, 201 bp, Homo sapiens
tagccctgcaccaggccctgaggacacagatatgaaagacaatgtcactaaccctgttggtcccaccctgggggagtggggcaggccccagtgagggcagmggggtcagcccccccctttttttttttgagacggagtctcgctctgtcgcccaggctggagtgcagtggtgcgatgtcagctcactgcaaactccgcctc

SEQ ID NO: 558639 - DNA, 201 bp, Homo sapiens; identical to SEQ ID NO: 409335

SEQ ID NO: 558640 - DNA, 201 bp, Homo sapiens; identical to SEQ ID NO: 409334

SEQ ID NO: 558641 - DNA, 201 bp, Homo sapiens; identical to SEQ ID NO: 409336

SEQ ID NO: 558642 - DNA, 201 bp, Homo sapiens
accctgttggtcccaccctgggggagtggggcaggccccagtgagggcagcggggtcagcccccccctttttttttttgagacggagtctcgctctgtcgmccaggctggagtgcagtggtgcgatgtcagctcactgcaaactccgcctcccgggttcacgccattctcctgcctcagcctccggagtagctggcactac

SEQ ID NO: 558643 - DNA, 201 bp, Homo sapiens
atggggtttcaccgtgttagccagcatggtctcgatctcctgacctcgtgatccgcccgcctcagcctcccaaagtgctgggattacaggcgtgagccacygcgcccggccggggtcagccccttgagaagatggacagctggggcggtgccggttaacagctttgtctccctgcagggctgtgggacagatgatgtctac

SEQ ID NO: 558644 - DNA, 201 bp, Homo sapiens
ctggtcacctttgtcctcctcctcatctgcattgcctactgggccatgactgctctgtatcctctgcccacgcagccagccactcttggagtcctgggggktgatggaaaacaaagcaatacttgccttgtagagtgccttggtgtcactggaagaggtgcccctttctctgggcagacacaccagcactgtgcctgaaca

SEQ ID NO: 558645 - DNA, 201 bp, Homo sapiens
tgcattgcctactgggccatgactgctctgtatcctctgcccacgcagccagccactcttggagtcctgggggttgatggaaaacaaagcaatacttgccytgtagagtgccttggtgtcactggaagaggtgcccctttctctgggcagacacaccagcactgtgcctgaacagagttgaaagggtgcacacaggctgaa

SEQ ID NO: 558646 - DNA, 201 bp, Homo sapiens
gaggaagcaggggacatggaggcgggactagtaggggtgaggggctgtaggggccacattcctcattgtgcagagaagactgaggccacagagggcaagamacttgtgcaaggtcacacactcaacccccagcagagctagaagaaaccagttcccagaatacctggtactcctgttgagccatccatcatgtggggaggg

SEQ ID NO: 558647 - DNA, 201 bp, Homo sapiens
aaagtgttgggattatacacatgagcaactgtgctgggtatgacgtgagtgttgttttcaacttgcttgtgatctagcagtaaagactgacagaaggccgsgcgcagtggctcacacctgtaatcccagcactttgggaggccgaggcaggtgaatcatgaggtccagagttcgagaccaacctggccaatatggtgacag

SEQ ID NO: 558648 - DNA, 201 bp, Homo sapiens
ggcgtgagccaccacgcccggccaatttttgtatttttagtagagatggggattcgccgtgttggccaggctggtcttgaagtcctggcctcaagtgatcygcccaccttggcctcctaaagttctgggattataggcatgagccaccgcacatggcctagacgctgggttttaaagactttcagaattttacaaaaattg

SEQ ID NO: 558649 - DNA, 201 bp, Homo sapiens
aactgctatttattacgattatttttatttatttatttttcttgagatggagtctcactctgtcacccaggctggagtgcagtggctcgatctcgcctcamtacaacctccacctcccgggttcaagtgattctcctgcttcagcctcccgagtagctgggattacaggcgtctgccactatgcccagctaattttttgta

SEQ ID NO: 558650 - DNA, 201 bp, Homo sapiens
aacctgggaggcagaggttgcagtgagccaagatcacaccactgcacttcagcctggctgacagtgagactccatctcaaaaaaaaaaaaaaaaaaaaaaagaatggattggtttagggagaggagatgtggggttgaaaataaactactctgttagttgtctttcctactccagggcttaggaatgcccccttttggttc

SEQ ID NO: 558651 - DNA, 201 bp, Homo sapiens
tccatctcaaaaaaaaaaaaaaaaaaaaaaagaatggattggtttagggagaggagatgtggggttgaaaataaactactctgttagttgtctttcctackccagggcttaggaatgcccccttttggttctaccttttctgacatcctcaagtccttgacttctcccagtcatgttctcatcccagctctgaagtcacct

SEQ ID NO: 558652 - DNA, 201 bp, Homo sapiens
tttccttgagacagggtctcactctgttgccctggctggagtgcggtggcgcgatcttggctcactgcaacctctgcctcctgggttcaagtgattcttcyacctcagcctcccgaatagctgggattaccggtgcatgccaccactcccagctaattttttgtatttttagtagggatggggtttcaccatgttggccag

SEQ ID NO: 558653 - DNA, 201 bp, Homo sapiens
acaagtgcccaccaccatgcccggctaaattttgtatttttagtagagatggagtttcaccatctaggccaggctggtcttgaactctcgaccttgtgatscacctgcctcagcctctcaaagtgttgggattacaggcgtgagccactgcgcctagtcctactttctttcttaaaataatatttatttatttaaaaatta

SEQ ID NO: 558654 - DNA, 201 bp, Homo sapiens
tgacacaactgaaatatgattctgtccagctttttttctttctttttttttttttttgagatggagtttcagtctgtcacctaggctggactgcaatggcktaatctcggctcactgcagcctctgcctcctgggttcaagcaattctctgcctcagcctccctagtagctgtgattacaagtgcccaccaccatgcccgg

SEQ ID NO: 558655 - DNA, 201 bp, Homo sapiens
agctcttctattcttttttcaagtcccttgtgggcaaggatgtggtcgtggaactaaagaatgacctgaggtaggtacctgttccaacaagtctgttgggrgtgggtgtgcccagggccctggaacctctttaatttgagaaatatttcagggctaggcgaggtggaagatgtacagaagaaataaatggatagggtgcag

SEQ ID NO: 558656 - DNA, 201 bp, Homo sapiens
agccaagatggtgccaccgcactccagcctgggtgacagagcaagactccgtctcaaaaaaaaaaaaaaaaaaaaagaaaaaaaagaacaggccataggcygggcacgatggctcatgcctgtaatcccagcactttgggaggctgaggcgggtggatcacgaggtcaagagagcgagaacagcctggccaacatggtgaa

SEQ ID NO: 558657 - DNA, 201 bp, Homo sapiens
atcatttgaacccaggaggcggagattgcagtgagccgagatggcaccattgcactccagcctgggcaacaagagcaaaactcttgtctcaaaaaaaaaawaataataataataatggtgttcatcttcctttcctagtatctcaacatcaaactaactgacatcagtgtcacagaccctgagaaataccctcacatggtg

SEQ ID NO: 558658 - DNA, 201 bp, Homo sapiens
aatcatttgaacccaggaggcggagattgcagtgagccgagatggcaccattgcactccagcctgggcaacaagagcaaaactcttgtctcaaaaaaaaawaaataataataataatggtgttcatcttcctttcctagtatctcaacatcaaactaactgacatcagtgtcacagaccctgagaaataccctcacatggt

SEQ ID NO: 558659 - DNA, 201 bp, Homo sapiens
tgggcagatcgcctgagatcaggagttaaggaacagcctggccaacatggtgaaaccccatctctactaaaaataaaaaattagccgggcatgatggcatrcgcctgaagtcctagctactcaggagactgaggcaggagaatcgcttgaacctgggaggcagaggttgcagtgagccaagatcacaccactgcacttcag

SEQ ID NO: 558660 - DNA, 201 bp, Homo sapiens
tcgcttgaacctgggcggcagaggttgcagtgagctgagatcacactgctgcactccagctgggtgacagagtgagattctgtctcaaaaaaaaaaaaaaagtaagtactaggctggccatggtggctcacacctgtaatctcagcactttgggaggctgaggcaggaggatcacttgagtccaggatgtcgagactagtc

SEQ ID NO: 558661 - DNA, 201 bp, Homo sapiens; identical to SEQ ID NO: 409360

SEQ ID NO: 558662 - DNA, 201 bp, Homo sapiens
cttggctcactgcaacctctacctcctgtgttcaaatgattctcgtgcctcagcctcctgtatacctgggactacaggcatgcaccacacacagctaattkttgtatttttatattttatttttaaattttttttttcctcctgggttcaagtgattctcgtgcctcacctcctgagtagctgggattacaggtgcacacc

SEQ ID NO: 558663 - DNA, 201 bp, Homo sapiens
ttagtagacatcgggtttcaccatcttcgtcaggctggtcttgaactcctgacctcgtgatccacctgcctcggcctcccaaagtgctgggattacagacrtgagccactgcacccggcctttttatattatttttaaaatttttcatagagacagagtctcggccgtgttgcccaggctggtcttgaactcctggactca

SEQ ID NO: 558664 - DNA, 201 bp, Homo sapiens
acccggcctttttatattatttttaaaatttttcatagagacagagtctcggccgtgttgcccaggctggtcttgaactcctggactcaagtgatcctccyacctcagcctctcaaagtgcagtgactacaggtgtgagccaatatgtgtgtggctttaaagtgacttttctgttgggatgagaaagaagatctttctcct

SEQ ID NO: 558665 - DNA, 201 bp, Homo sapiens
ttttgttattaggcagagactcaccctctgtctcaaaaaaaataatgattgcctagtactagttcatttaaattaatttcctagagcatatttaagtgggycttttttttttttttttttttttgagacagatccttactctgtcaccgaggctggaatgcagtggcatgatcttggctcactgcaacctctacctcctgt

SEQ ID NO: 558666 - DNA, 201 bp, Homo sapiens
tcttggctcactgcaacctctacctcctgtgttcaaatgattctcgtgcctcagcctcctgtatacctgggactacaggcatgcaccacacacagctaatytttgtatttttatattttatttttaaattttttttttcctcctgggttcaagtgattctcgtgcctcacctcctgagtagctgggattacaggtgcacac

SEQ ID NO: 558667 - DNA, 201 bp, Homo sapiens
ggcaggaccagaaccttcgcaaaagaaagagctagacctagagctctggtcctggcttggcgaagaatgggagaggtcaaaggtgggagcgaggccgctgrctggtgagtagagccccaccagagcagatgagctggaagtgcagcagagttagagcctgggctggactgtcggtggggtagagtctaagttgtttccggt

SEQ ID NO: 558668 - DNA, 201 bp, Homo sapiens
cgagcgggacccccaccgtgcctcccctccagcctttcgtcggccgcctacgctccctggactctggtatccggcggctggagctcctcttgagcgcgggrgactcgggcacttttttctgcaagggccgccacgaggacgagagccgtacagtgcttcacgtgctgggggacaggacctattgcaaggcccccgggccta

SEQ ID NO: 558669 - DNA, 201 bp, Homo sapiens
actccgacacatacccggaggagggaagagggccttggctgggggttcttgagcgggactgctggctgtccctcgtcaaacccctgacctcagcatccctmcccgccacgcctttcccccagggtccgtgtatccccagctcctgatcccgctgctgggcgctgggttggtgctcggactgggagctttgggcctggtctg

SEQ ID NO: 558670 - DNA, 201 bp, Homo sapiens
tcaattcctgagtctgagcccttgctgggagcagacacgttggtcaccttctctccatccttcagctctgtcccccccacatagctccacttgtgaaaacygagccccagaggccagtaaaggaggaagagcccaagattccaggggacctggaccaggaaccggtaagggcatggggatgggaaggggatagccagaatc

SEQ ID NO: 558671 - DNA, 201 bp, Homo sapiens
tgtccttggcgtggcgagtcccaggagaaccagtgagacaagactggtggttctcaaagactcatatgtcccttacaggcgcctgcccccgcaaccgattsgaccactccctagatttggtgagactaattccaccccattttctttctcctacatgcccactccccacccctcaattcctgagtctgagcccttgctggg

SEQ ID NO: 558672 - DNA, 201 bp, Homo sapiens
tgtccaaaggacgccgaccgatcctgtgggcctcttcgagcgggacccccaccgtgcctcccctccagcctttcgtcggccgcctacgctccctggactcyggtatccggcggctggagctcctcttgagcgcgggggactcgggcacttttttctgcaagggccgccacgaggacgagagccgtacagtgcttcacgtgc

SEQ ID NO: 558673 - DNA, 201 bp, Homo sapiens
cccccaccgtgcctcccctccagcctttcgtcggccgcctacgctccctggactctggtatccggcggctggagctcctcttgagcgcgggggactcgggmacttttttctgcaagggccgccacgaggacgagagccgtacagtgcttcacgtgctgggggacaggacctattgcaaggcccccgggcctacccatggta

SEQ ID NO: 558674 - DNA, 201 bp, Homo sapiens
ccccacgcctaacttccctccggtccccccccaaccggccccacgccgctgattcgctcgcagcttctcctcaccacatcctaaccatggctgtgtttctkcagctgctaccgctgctgctctcgagggcccaagggaaccctgggggtaagcgatccctgggagagttgtgatagacgcagaggggctgaagcaagataa

SEQ ID NO: 558675 - DNA, 201 bp, Homo sapiens
ctgggagtagcggctaaagctgggggatagaggggctgcagggccactggaaggaacatggagctgtcatcactcaacaaaaaaccgaggccctcaatccmccttcaggccccgccccatgggcccctcaccgctggttggaaagagtgttggtgttggctggggtgtcaataaagctgtgcttggggtcgctggcttgtg

SEQ ID NO: 558676 - DNA, 201 bp, Homo sapiens; identical to SEQ ID NO: 409713

SEQ ID NO: 558677 - DNA, 201 bp, Homo sapiens
caggcacctctaccacgccctcccagcccaattctgcgggtgtccaagacactgagatggtgcgtttggagctggtagggagcaggaggggtgggaagccytggagacttccatctgagactgctcccttgggcttggagacgtctccattgtctgtcctgggtgcttgcctggtgggccagaaggttggaatggggagct

SEQ ID NO: 558678 - DNA, 201 bp, Homo sapiens; identical to SEQ ID NO: 409702

SEQ ID NO: 558679 - DNA, 201 bp, Homo sapiens
aattgattgatttttaaattagttaattttttaaaattaagtaattagttaattttttaaaattaagtaattaattaattttttaaaattaagtagttaattttttttaattaagtaattaattaattttaaaaagtatttatttattttgagacaaagtctcactctgttgcccaggctggagtacagtggtccagcgtc

SEQ ID NO: 558680 - DNA, 201 bp, Homo sapiens; identical to SEQ ID NO: 409659

SEQ ID NO: 558681 - DNA, 201 bp, Homo sapiens
caaaaaaaaaaaaaaaaaaaaaaaaaagagagggaacccccgaggagacgctcaggtgtttttacatcctcagactcagatgtcccctctcattctcctgstggaagcctctggcctcactcctgacctgtgtgcctctctctccagtgccgctcctcccaggggcagcgccgaggtccctgctggtgtgtggatcggatg

SEQ ID NO: 558682 - DNA, 201 bp, Homo sapiens; identical to SEQ ID NO: 409704

SEQ ID NO: 558683 - DNA, 201 bp, Homo sapiens; identical to SEQ ID NO: 409632

SEQ ID NO: 558684 - DNA, 201 bp, Homo sapiens
aggcagtttggaactaaatggttgggtgctaaatgtagggaatgaaggagaaggtctggggaggggtgggcatcctgaggaagaaggatcagactcaggaytgcaggggaaatgtctcctgggttgtgagtggtagttagctgggagcttgtctttaggcacagaggaagaggatcccttcaggggttctgatatctgatt

SEQ ID NO: 558685 - DNA, 201 bp, Homo sapiens; identical to SEQ ID NO: 409634

SEQ ID NO: 558686 - DNA, 201 bp, Homo sapiens
tcacagggtaccagaagggagaggttcccactgcagtgccccagaagtaaccacatctcaggcctgggaggggtgggttgagtcatagcaaggtcacagcmgggacacacattccttttgggtccctgttggcccccctcctacatccgttgctcttctgccccagctctccggcttcgtgcgcccccttctggcctctgg

SEQ ID NO: 558687 - DNA, 201 bp, Homo sapiens
agtggagacggggtttcaccatgttggccaggctggtctcgaacgcctgacctcaagtgatctgcccaccttggcctcccaaagtgctgggatgacaggcrtgagccactgcgcccagccaataatttatttatttttgagacagggtctcactcggttgtccaggctgaagtgcagtagcacaatcatggctcactgcag

SEQ ID NO: 558688 - DNA, 201 bp, Homo sapiens
catctgttttaaaaattacaaaaattagccagatgtggtggcatgcacctgtaatcccagctactcaggaggctgaggcaagagaattgcttgaacctggraggtggaggttgcagtgagcagagatcatgccaatgcattccagccagggcgacagagcgagactccatctcaaaaaaaaaaaaaaaaaaaaaaaaaaga

SEQ ID NO: 558689 - DNA, 201 bp, Homo sapiens
cactggaaggaacatggagctgtcatcactcaacaaaaaaccgaggccctcaatccaccttcaggccccgccccatgggcccctcaccgctggttggaaaragtgttggtgttggctggggtgtcaataaagctgtgcttggggtcgctggcttgtgtctctgtgtctgcctctcacaattctggaatccctggccctctc

SEQ ID NO: 558690 - DNA, 201 bp, Homo sapiens; identical to SEQ ID NO: 410682

SEQ ID NO: 558691 - DNA, 201 bp, Homo sapiens
tgcacagcctccttctctctgagattcaagagtctgatcagcagcctcttcctcctccaggacccagaagccctgagcttatccccatggagctctgccgrtccctggccctgctggggggctccctgggcctgatgttctgcctgattgctttgagcaccgatttctggtttgaggctgtgggtcccacccactcagctc

SEQ ID NO: 558692 - DNA, 201 bp, Homo sapiens
cagctcactcgggcctctggccaacagggcatggggacatcatatcaggtaaggggaatgggtgtcctacagaggggttgccagcggggatgggtgctcartggtcttctcccgatcaggctacatccacgtgacgcagaccttcagcattatggctgttctgtgggccctggtgtccgtgagcttcctggtcctgtcctg

SEQ ID NO: 558693 - DNA, 201 bp, Homo sapiens
ggaggggagggaggacgttgcctgtgcaatccaggaagggagggtatgtgaaaagctaccgggaactgtgtgaaaccaaaccagcctcatgtgacaaagcrcaggacccctcactgccccaactgcttgctgttctctctttcttgggctctaaggacccaggagtctgggtgcacagcctccttctctctgagattcaag

SEQ ID NO: 558694 - DNA, 201 bp, Homo sapiens; identical to SEQ ID NO: 410685

SEQ ID NO: 558695 - DNA, 201 bp, Homo sapiens
tctggccaacagggcatggggacatcatatcaggtaaggggaatgggtgtcctacagaggggttgccagcggggatgggtgctcagtggtcttctcccgawcaggctacatccacgtgacgcagaccttcagcattatggctgttctgtgggccctggtgtccgtgagcttcctggtcctgtcctgcttcccctcactgtt

SEQ ID NO: 558696 - DNA, 201 bp, Homo sapiens; identical to SEQ ID NO: 410686

SEQ ID NO: 558697 - DNA, 201 bp, Homo sapiens
cctggtcctgtcctgcttcccctcactgttccccccaggccacggcccgcttgtctcaaccaccgcagcctttgctgcaggtaaggactctggactggackggggcatcgcgagccagcgaattcctgccgaggagctgagccatctctcttgtccttgtccccagccatctccatggtggtggccatggcggtgtacacc

SEQ ID NO: 558698 - DNA, 201 bp, Homo sapiens; identical to SEQ ID NO: 410703

SEQ ID NO: 558699 - DNA, 201 bp, Homo sapiens
tgctgttctctctttcttgggctctaaggacccaggagtctgggtgcacagcctccttctctctgagattcaagagtctgatcagcagcctcttcctcctmcaggacccagaagccctgagcttatccccatggagctctgccggtccctggccctgctggggggctccctgggcctgatgttctgcctgattgctttgag

SEQ ID NO: 558700 - DNA, 201 bp, Homo sapiens
ggtgctcactgtggcggtccccgtcctggctatgaaaccttgtgagcagaaggcaagagcggcaagatgagttttgagcgttgtattccaaaggcctcatmtggagcctcgggaaagtctggtcctacatctgcccgcccttccagcccttccccagcccctcctcttgtttcttcattcattcaacaaaatttggctgga

SEQ ID NO: 558701 - DNA, 201 bp, Homo sapiens
ctggctatgaaaccttgtgagcagaaggcaagagcggcaagatgagttttgagcgttgtattccaaaggcctcatctggagcctcgggaaagtctggtccyacatctgcccgcccttccagcccttccccagcccctcctcttgtttcttcattcattcaacaaaatttggctggaatctggttattttgagattaattct

SEQ ID NO: 558702 - DNA, 201 bp, Homo sapiens
cagggcccgcccctgcctgcccgcctggggcggtctgcagtctcaccgccgaggaagaggaaggcgctcgtggtctggccccgcagcgactcgccctcgtygcaccgaatccgcagtcccatcaccatgcccaccacgccgacacccaccgccagcaccatgcacgccacagtcaccgccagcgtggctggggagagcggg

SEQ ID NO: 558703 - DNA, 201 bp, Homo sapiens
agaaaagcacgcggagccgcagcgctaaaaaaagccgttcctttattctgccccaggcaggctgcagtcacagacacacggggaatccactgatggcgtcrgtgctctgcatgatcatgtctgccagcagaaagcagaagcctggggggacgggggtgcggagcagggagaggaaggtgggccctggggcggatggccggg

SEQ ID NO: 558704 - DNA, 201 bp, Homo sapiens
agggcccgcccctgcctgcccgcctggggcggtctgcagtctcaccgccgaggaagaggaaggcgctcgtggtctggccccgcagcgactcgccctcgtcrcaccgaatccgcagtcccatcaccatgcccaccacgccgacacccaccgccagcaccatgcacgccacagtcaccgccagcgtggctggggagagcgggc

SEQ ID NO: 558705 - DNA, 201 bp, Homo sapiens
gtccccgagaggtccccggggtttcctgggagggcagctggggagcctctggggtgagggtcttctgggcagtctcctccaccctcttcccgctgtccagkttacccgcgagaattgagaagggtaaggccagccacccagaaaaataggaccaagagaagaagacgttgttcttccacgcattcttcacggtgtagccta

SEQ ID NO: 558706 - DNA, 201 bp, Homo sapiens
acgccacagtcaccgccagcgtggctggggagagcgggcgcatcagcccccgcgggcgccgccccagtcactacgggttcggccgcaaccggaagctctcycgtctcctgcccccaacccggtgtgtggccaggagccgagctccaccgaccgggagtcaggcgtttggattgagacttggaggtcacatcaggacctgcg

SEQ ID NO: 558707 - DNA, 201 bp, Homo sapiens
tgacatctgggcgggcggagcctcactctggcaggggatgctggagcagatgccgtggttgcattcctgccacaggccactgtggccctcttgttggcggrtccagtagttggtggccgtggagagcaccatgaggacgttggccacgaggctgagcagaatgcccccactctggaggctccgcttcacccccatgccact

SEQ ID NO: 558708 - DNA, 201 bp, Homo sapiens
ggctccgcttcacccccatgccactgaggctgcagccgggggccacaagggcaggatgggcccaggcctttcctaccccgaggcccccagctgaggagccygcttcctccacactcctcccctggtactcctgcctgaggtccctgcttctggggacctggagacccccctccctcaacaaccctgcctgaggatccacaa

SEQ ID NO: 558709 - DNA, 201 bp, Homo sapiens
tgccccaggcaggctgcagtcacagacacacggggaatccactgatggcgtcggtgctctgcatgatcatgtctgccagcagaaagcagaagcctgggggracgggggtgcggagcagggagaggaaggtgggccctggggcggatggccgggagggccccggggactggggtttggggctccaagggggtctctgccggg

SEQ ID NO: 558710 - DNA, 201 bp, Homo sapiens
tgggcagtctcctccaccctcttcccgctgtccagtttacccgcgagaattgagaagggtaaggccagccacccagaaaaataggaccaagagaagaagamgttgttcttccacgcattcttcacggtgtagcctatcaaggcggtcagcagcagcagtcctgggccccgcccagccgcaagatgagctagctgggcctgg

SEQ ID NO: 558711 - DNA, 201 bp, Homo sapiens
tcgcctctcagcccgcccctggcccaggccccttcctgctcctcccgctctgaactctgtctcgagccccgcccacctctctcggcttcttccagccctgyccctcggatcctggccgagtacctcaagcccctcccctggcgaccaggcccctccatcacccagggcccgcccctgcctgcccgcctggggcggtctgca

SEQ ID NO: 558712 - DNA, 201 bp, Homo sapiens
aggcccctccatcacccagggcccgcccctgcctgcccgcctggggcggtctgcagtctcaccgccgaggaagaggaaggcgctcgtggtctggccccgcrgcgactcgccctcgtcgcaccgaatccgcagtcccatcaccatgcccaccacgccgacacccaccgccagcaccatgcacgccacagtcaccgccagcgt

SEQ ID NO: 558713 - DNA, 201 bp, Homo sapiens
ggattttactctgagtgaggtgaaaagccatgggaggtttctttttaaatcgtggctatatatatatatatatatatatatatatatatacacacacacayatatatacatacatacacatataaacatatatatacatatatcataaatgtacccttttaaccattttaagtgtacagtttaatgtcattaaatacattc

SEQ ID NO: 558714 - DNA, 201 bp, Homo sapiens
gtgaaaagccatgggaggtttctttttaaatcgtggctatatatatatatatatatatatatatatatatacacacacacatatatatacatacatacacatataaacatatatatacatatatcataaatgtacccttttaaccattttaagtgtacagtttaatgtcattaaatacattcacattgttgtgcaaccaca

SEQ ID NO: 558715 - DNA, 201 bp, Homo sapiens
tgaaaagccatgggaggtttctttttaaatcgtggctatatatatatatatatatatatatatatatatacacacacacatatatatacatacatacacatataaacatatatatacatatatcataaatgtacccttttaaccattttaagtgtacagtttaatgtcattaaatacattcacattgttgtgcaaccacaa

SEQ ID NO: 558716 - DNA, 201 bp, Homo sapiens
tttcacttaacataatgatctccagttccatccatgttgcagcaaatgacaggacctcattcttttttatggatccattgtgtatatgtacatcttctttwtccattcatctgttgatggacacttaggttgcttcaaaacatagtagattctttttttaaaaaaaaattattttcataggttattggggaacaggtggtg

SEQ ID NO: 558717 - DNA, 201 bp, Homo sapiens
ctctttaacaatttattcttctattgactaggaattgaaatggtcatactttggctctatctggttaaataaaatgttttattataataaatctcacctgyttctacttttcttaatggaagtactagaacattgtaaattgcacaggtggctcacgttctatttctgttggacagtgctgccctagagctgtcttcagct

SEQ ID NO: 558718 - DNA, 201 bp, Homo sapiens
ttttgctcttttgcccaggctggtgtgcagtggtgcgatctccactcactgcaacctctgccttccagtttcaagcaattctcctgcctcagcctcccagrtagctggggttacaggtgcccgccaccacacccagctaatttttgtatttttagtagagaccgggtttcaccatgttggccaggctggtctcgaactcct

SEQ ID NO: 558719 - DNA, 201 bp, Homo sapiens
ctttagtggtgattgtaagattttggtgcacccatcacctgagcagtatacactgcacccaatttgtagtcttttatccctcacccccttcccaccatttyccccaagtccccaaagtccattgtgccattcttacacctttgcatcctcatagcttagctcccacttatgagggagaacataaaatatttggttttccat

SEQ ID NO: 558720 - DNA, 201 bp, Homo sapiens
tttagtagagaccgggtttcaccatgttggccaggctggtctcgaactcctgacctcatgatcctcacgccttggcctctcaaagtgctgggattacaggsatgagccactgcacctggcctcgaccacattttaaataatccattcacctgttgatagacacttgggtagcttccacattttggctattgtcaataatgt

SEQ ID NO: 558721 - DNA, 201 bp, Homo sapiens
catagcttagctcccacttatgagggagaacataaaatatttggttttccatttctgagttactttacttagaataatagtctacaatctcatccaggtcsctgcgaatgccattaattcattcctttttatggctgagttgtattccattatatatatttatataccacactttctttgcccacctgttgatttatgggc

SEQ ID NO: 558722 - DNA, 201 bp, Homo sapiens
atttgtactgagataagctgtatcacatggtagctaactgcataggctgtgccatcagtcaaagagtcagacctggactctgatcctacacctttgattcrctagctgtgtggccttggggaagctgcttaatctcctgagctgcagtttcagcctcatctgtaagaaagggatacatttctctatagatttgctgcgaga

SEQ ID NO: 558723 - DNA, 201 bp, Homo sapiens
tttctgagttactttacttagaataatagtctacaatctcatccaggtccctgcgaatgccattaattcattcctttttatggctgagttgtattccattwtatatatttatataccacactttctttgcccacctgttgatttatgggcatttgggtttgttccacatttttgcaattgcaaactgtgctgctataaaca

SEQ ID NO: 558724 - DNA, 201 bp, Homo sapiens
ctgagataagctgtatcacatggtagctaactgcataggctgtgccatcagtcaaagagtcagacctggactctgatcctacacctttgattcgctagctstgtggccttggggaagctgcttaatctcctgagctgcagtttcagcctcatctgtaagaaagggatacatttctctatagatttgctgcgagaatgaaat

SEQ ID NO: 558725 - DNA, 201 bp, Homo sapiens
ccattaattcattcctttttatggctgagttgtattccattatatatatttatataccacactttctttgcccacctgttgatttatgggcatttgggttkgttccacatttttgcaattgcaaactgtgctgctataaacatgtatgtgcaagtatctttttcatatgacttcttttcttctggatagatgcccagaagt

SEQ ID NO: 558726 - DNA, 201 bp, Homo sapiens
tgagaagccaataggagcagcttaggaaggatcttgatggttctggattttactctgagtgaggtgaaaagccatgggaggtttctttttaaatcgtggcwatatatatatatatatatatatatatatatatacacacacacatatatatacatacatacacatataaacatatatatacatatatcataaatgtaccct

SEQ ID NO: 558727 - DNA, 201 bp, Homo sapiens
acatggtagctaactgcataggctgtgccatcagtcaaagagtcagacctggactctgatcctacacctttgattcgctagctgtgtggccttggggaagytgcttaatctcctgagctgcagtttcagcctcatctgtaagaaagggatacatttctctatagatttgctgcgagaatgaaatgatacaaggcaaagggg

SEQ ID NO: 558728 - DNA, 201 bp, Homo sapiens
agcactcttaaaatgcttggtacacagtaggccttcaatagactgaagctgttatggtttttcttgttgtgccacgttattattgttggttgttattaccrtattttgttattattattactaagaggaatttaatgcaaggaaactgaaactgaggtcacacgcagctcccgggccagtgcctctcaaactttaacatgc

SEQ ID NO: 558729 - DNA, 201 bp, Homo sapiens
tgctttcttctttattttcccttatatctgtgtctgttgggtctctctatttcatggttaccttttatttgtgttacatgatactaacttttcatttatawgaggaagacatacttctaaaactgtatttcaaccaatgtgaagcttaaccaatgagaaaagccttttccctaggggtttttgtccaaaacaattacggac

SEQ ID NO: 558730 - DNA, 201 bp, Homo sapiens
gtggatacatagtaggtgtatatatttatggggtacatgagatgttttgatgtaggcatgcaatgcgtgaaaatcacatcatagagaatggggtatccatmccctcaaagcatttatcttttgtgttacaatctaattatactctttcagttattttaaaatgtacaattaagtttttattgactatagtcaccctgatgt

SEQ ID NO: 558731 - DNA, 201 bp, Homo sapiens
tttgtgttacatgatactaacttttcatttataagaggaagacatacttctaaaactgtatttcaaccaatgtgaagcttaaccaatgagaaaagcctttkccctaggggtttttgtccaaaacaattacggacaaatgtttaacttcattgttgcctaaggtggtggataacagtaggcacaaacaatagattcaccaaa

SEQ ID NO: 558732 - DNA, 201 bp, Homo sapiens
ctaaggagatttcccagccaagtgttgaagatgtggactgatttcttcttgctggttatattacaatgctgaaggaaagaaatagacagaggaaagaattrttaagcaaaaatagagccagaacctggtggtttgaacaattctcagccttcctatattataaaagacattaaagttaggatattcactgtcagaaaagta

SEQ ID NO: 558733 - DNA, 201 bp, Homo sapiens
ttgctagcgacacctcaaaaagaaaggaggagtatgacagatgagactgtattgttttaaagaatcatgaagactgttagtagaaatatgaacattaaagrcacagatgataaaaactcagaaggaaatgaaaaatgtaatatcagaaactgaaggaaagtggatccttattatatagtggcagaaattttggctgaatgg

SEQ ID NO: 558734 - DNA, 201 bp, Homo sapiens
tgagggcaacgtcctgcctcctggagaagaggggaatgttgccgtccgtatcagacccactcggcccttctgtttcttcaattgctatttggtaagagacrgggaacagccgttctcatgacagtgactgtgtgctaagcattgtgcaccacactttgtaaatatctatttgtttaatccttacaatgactgcatgaggta

SEQ ID NO: 558735 - DNA, 201 bp, Homo sapiens
caacttctggcaaggcctggcatggagaggagaaagacacacaggcctggttggcacgggctgctgggctgctgggagaggcccagggtgtagacactcaygtatgcacctctgtgatgatttccttaccagattgtggatgatgagggcaacgtcctgcctcctggagaagaggggaatgttgccgtccgtatcagaccc

SEQ ID NO: 558736 - DNA, 201 bp, Homo sapiens
ggccccagaaggcttctcccctgatttccttctcctgaccacctggccttggtccgcaggtggaggagattcgaggcttcattgacaagatcgcagagaaygtggaggaggtgaagcggaagcacagtgccatcctggcatcccccaaccccgacgagagtgagtgtgtggggcgggggacgggtttcaggccccacaagc

SEQ ID NO: 558737 - DNA, 201 bp, Homo sapiens
ccggggtcagattttcttctcacctccagcacggcctcctggtctatgacccctcacccccaagcccactggcatcttcaagaacccagagtaaatctttycacagccccaaagtgtgcatgaacccaggtcagtgccacaccaactaagccagtgccccgccctcagaaggcaaaatgggtcaggtgggagcagggtgga

SEQ ID NO: 558738 - DNA, 201 bp, Homo sapiens
tgacctgccctgtcctctccagctgtccccacaagcagagccctgaggggtggggaccagctggccacatggtgctgcttttcaggttaggggagaggtgrccctgagggacagcccagctctgagtctcagtcgctgatcactgccagggaggctcaggctgccatggctccaggctccctcccctgcctaggggcaaag

SEQ ID NO: 558739 - DNA, 201 bp, Homo sapiens
cgcaggtggaggagattcgaggcttcattgacaagatcgcagagaacgtggaggaggtgaagcggaagcacagtgccatcctggcatcccccaaccccgaygagagtgagtgtgtggggcgggggacgggtttcaggccccacaagcctcgggaaggggctgctgccagggaggcctcacgggacctctgcagccttcatg

SEQ ID NO: 558740 - DNA, 201 bp, Homo sapiens
gggcactgcccctcacctctgctaaagagggttgaagaagtggccagtacttcctggtctcttgcagaagcccggtattctgggtgaacagacacgtgcaycccatgagtgccaaggcctcggggccacatgccctgcaggaggggccacctggctctccccgctgtgggcatggtccctcgtacacagcctttctgagca

SEQ ID NO: 558741 - DNA, 201 bp, Homo sapiens
ccccgccccgtgtcgtgtgcatgatctctgtgagtgtgcgtctgtacgggaagaggcagagggaggcagccagcggggcgtgatgcagtgtgcacagcgargagcagacccaggcagggccgccagggtgacacaggccacccttccttgccttcagtaactcggtgggcccaggttctgctcttccctgggaaccctaac

SEQ ID NO: 558742 - DNA, 201 bp, Homo sapiens
gctggaggacatgctggagagtgggaaccccgccatctttgcctctggggtgagtgtaggccccatccctcctgccatgaccccctcaccatgttccctaygtccatgacccctagtgctgggtctggacagtatttggacacagaccccttgtaaggcaggttttagggaaggaagagtcccagagaggggaaaacacca

SEQ ID NO: 558743 - DNA, 201 bp, Homo sapiens
ctgggtgacagagcgagaccctgtctcaatcaatcaatcagtccatccatcaatcaaacaaacatacctgccctgcttccccactttttctcagccctccytccatgcagccaggtgtcactgtccccatttcacagaagagtaaatagagccagaggggttaaggcccagcctgatgagtcccatcagttctctcagccc

SEQ ID NO: 558744 - DNA, 201 bp, Homo sapiens
tgcccagaggcccccagggagagggggaggggcagggccctggcgctgtaccctgggcacctgcgtgtgtacaggtgggtcctgtacatacgtccacttaygtgtgcacaaccccgcacaggccaaggacagcgatgatgatgatgatgtcgctgtcaccgtggaccgagaccgcttcatggatgagttctttgagcaggt

SEQ ID NO: 558745 - DNA, 201 bp, Homo sapiens
tggaacaactcttgggcaggggctgtaatttggggtccctgggaaggatctgaaagggaaggaatacttaaaaagaaaaatctagggaggatgtggatgcygccttcaaatctatagcaggggtaccccagggagagggcacccacaggttctttatggcctggaaccaaaccacagggaagagaaggactctaacagttg

SEQ ID NO: 558746 - DNA, 201 bp, Homo sapiens
gttggagtgagtggtcaaggaaggcctctcaggaggggacatttgagctgatgccaaaaaagggggaaaaggagccagctgtgaagacttcgcagcggagwtgaagagctggccccagcaacactaaggtcccaagcccagcaagacccagacttatttcaggaacagaaaaaggaggtccttgctgctggggcacaagga

SEQ ID NO: 558747 - DNA, 201 bp, Homo sapiens
tggttccagcagggtctgttcttcctagcagtctccatgctagggaggtaaggagcactccctcccagccttcctggttggaggtggtgttttttgttggttttttttttgtttttttagacggagtctcgcactgtctccaggctggagtgcaatggtgccatctcagctcactgcagcctccacctcctgggttcaagt

SEQ ID NO: 558748 - DNA, 201 bp, Homo sapiens
agatgaagctggagacgaggtggacggggccttggcaggcagtgtgctggggaatttgcggtctcttctagattggagggggtttgggttgtttgttttgktttagcaaaagatgggatcttgctgtgttgcccaggctggtctcggaactcctgggctcaagtgatcctctcacctcagcctcccaaagtgctgggatca

SEQ ID NO: 558749 - DNA, 201 bp, Homo sapiens
ggtcctccagatcttactgtggctgggagcggaacagccaggcctgttcttgtccctgcccagaggcccccagggagagggggaggggcagggccctggcrctgtaccctgggcacctgcgtgtgtacaggtgggtcctgtacatacgtccacttatgtgtgcacaaccccgcacaggccaaggacagcgatgatgatgat

SEQ ID NO: 558750 - DNA, 201 bp, Homo sapiens
ctgtacgggaagaggcagagggaggcagccagcggggcgtgatgcagtgtgcacagcgaggagcagacccaggcagggccgccagggtgacacaggccacscttccttgccttcagtaactcggtgggcccaggttctgctcttccctgggaaccctaacctcgcctccagctgacctgccctgtcctctccagctgtccc

SEQ ID NO: 558751 - DNA, 201 bp, Homo sapiens
cacagcgaggagcagacccaggcagggccgccagggtgacacaggccacccttccttgccttcagtaactcggtgggcccaggttctgctcttccctgggraccctaacctcgcctccagctgacctgccctgtcctctccagctgtccccacaagcagagccctgaggggtggggaccagctggccacatggtgctgctt

SEQ ID NO: 558752 - DNA, 201 bp, Homo sapiens
gtggtacgatatcttaaagagaggaggcccctctgagccgcctctatcaaagctcctaactaccccctctccccatgagtccccactttgatggggtgatrtgagcccctcacagaacatgctcaggccgggcatggtggcggctcacacctatactcccagcactttgggaagccaaggtgggaagatcacttgagccca

SEQ ID NO: 558753 - DNA, 201 bp, Homo sapiens
cagacccaggcagggccgccagggtgacacaggccacccttccttgccttcagtaactcggtgggcccaggttctgctcttccctgggaaccctaacctcscctccagctgacctgccctgtcctctccagctgtccccacaagcagagccctgaggggtggggaccagctggccacatggtgctgcttttcaggttaggg

SEQ ID NO: 558754 - DNA, 201 bp, Homo sapiens
tgaggtgggaacaagatcagatgtggtggttcacgcctgtaatcccagtactttgggaggccgaggcgggtggatcacctgaggtcaggagttcgagaccrgcctggccaacatagtgaaacctgtctctactaaaaatacaaaaattagctgggcatggtggcatgcacctgtaatcccagctactcgggaggctgaggc

SEQ ID NO: 558755 - DNA, 201 bp, Homo sapiens
tttttctcagccctccctccatgcagccaggtgtcactgtccccatttcacagaagagtaaatagagccagaggggttaaggcccagcctgatgagtcccrtcagttctctcagcccctcaacctccacctgcctccgtcctgacgcgagagcaccgaggtggggtcagtgctgagctagtcagtggccactcccgtgagg

SEQ ID NO: 558756 - DNA, 201 bp, Homo sapiens
ttttttttttttttttgagatggagtcttgctctgtcgccaggctggagtgcagtggcacaatctcagctcactgccacctctgccttccgggttcaagcrattcccctgcctcagcctcccaagtagctgggattacaggcacgcgccaccatgcccggctaattttttgtattttagtagagacggggtttcaccatgt

SEQ ID NO: 558757 - DNA, 201 bp, Homo sapiens
gggccagggtcacacagccagggaaagacttttaggttagagcatccccaggagccccactcaggctgtagctgcctcctcccctcaactcagagactccytgattttcttcctggggactttgcagagctgacctttctccctgggcccagaacatgtatttgtctatgtgccaggtcatgtgggacagacacatgggac

SEQ ID NO: 558758 - DNA, 201 bp, Homo sapiens
ccgcccccggtccacctatccaccttcgggctttcgggcagcactggctggcgtttccagacccttcagggttccttgcgacttggatctatttttctacstgtatctgggaaacccctggggtgtggctcctggggcggggtttggggggagtaggaggatgcacaaacgttctgagtcagagcccaccttctcccagcc

SEQ ID NO: 558759 - DNA, 201 bp, Homo sapiens
tacagggaccactgaaacgtgttcttgccatggggagagagattgggctcaactccagaaaggataagtgggggtttatgaccatagagcaggatgggggsggccagtggatggaaaattaccaaggaaatatccaggataaggagcttctggctaaattgccttgataggattctagctgaaggcaggccaggtgatcaa

SEQ ID NO: 558760 - DNA, 201 bp, Homo sapiens
actgaagctattgattcaggctgaattccccagtttactcaaagtaagtggccatccgcagagcccacttaatgggactgatggtgggaggggagggaggraggggagaggactccggtagagccttatagggaccgtcgcttgagggaggacacatgcaggtggggtttcttccccttaagtcaggccacatttcagaag

SEQ ID NO: 558761 - DNA, 201 bp, Homo sapiens
gccaaggaaatggcccaatggcactaaaatcctgcagacaaccctcagcacaaaactgtacttcagctttttggtaagtttattttcttcccaatttatargacaccagaatgagtactaaaaagtctcctgaggaactgaagaggatttttgaaaaatatgcagccaaagaaggtgatccagaccagttgtcaaaggatg

SEQ ID NO: 558762 - DNA, 201 bp, Homo sapiens
agaaaggaaaacaactgataaatccagagcccaagattacggatttgaaattaatacactaccactaccacctctctccctgaaacagagaccctctctgtgtaaaatgaaagagatgaaaggagcttaaaaagctgcttaaaactgcagaagttcctctgggtactgacctatctggttgggcctaccttttcagggact

SEQ ID NO: 558763 - DNA, 201 bp, Homo sapiens
tcctctgggtactgacctatctggttgggcctaccttttcagggactgtgtccatgaccaggtctccatacatgttcatcacctggggagaagatgggagscagcttgccatggagggtgcggcatgggtacagggctcccccatgcagagggccccagacaccctgctccctgaatcccctctcaggcctgtttctctac

SEQ ID NO: 558764 - DNA, 201 bp, Homo sapiens
ctgcaagaagatccctgagggtgtaagctcttgattttgaggactgaaattaaggaatgccggagccaatcatcctgcctagctgtagaaatttcctggcytttgaatgggagggcagggaaaccagaagagaaaagaactcttcattttcctcccccaacctgttcctctcccacttttcccgttacataggccaaaaac

SEQ ID NO: 558765 - DNA, 201 bp, Homo sapiens
acctccaggtggatggggattagcagtagctccttattgaagatgtccacctaaagagatagtgccacaggtcaggtacaacaaacagaagtcttgccttytgccatgaaggttctagagaggaacagagacacaggtaagggaaccaagtgaaagaacagaagacccaaggcctagattgtgggcaagctcaggatctgc

SEQ ID NO: 558766 - DNA, 201 bp, Homo sapiens
ctcccccaacctgttcctctcccacttttcccgttacataggccaaaaacctaggcatcatcctccatttctttttcttcatttcccacatccaacctgcrgaggaaaaaacaaatctttttttttttttttttttttgagacggagtcttgctctgttgcccagactggagtgcagtggcgtgatcttgcctcactgcaa

SEQ ID NO: 558767 - DNA, 201 bp, Homo sapiens
tcctctaggagtcggaggagggagagaggctagttgcttaagggctccttactctgtacgcaggtcacatgctcctctcgcagggggctgtgctggccggstttctccccaggcctctctgcctcttctgccatgcccaaatctgagccctgaaaaagctcctgggccacatggtccccgatgctgcacacattgctgatg

SEQ ID NO: 558768 - DNA, 201 bp, Homo sapiens
aagactggatcagctgcaacaccaggcccttcctgagtaggccaagggtggagtcacacaaaagatgatgcagctggggcacacagaaatacctactactmcctggaatacaaattctaactgactcccttttttctggctcatgatgggtccttctgaggacctgcgaaaggcccactccccagaaagataaacatgact

SEQ ID NO: 558769 - DNA, 201 bp, Homo sapiens
tatgaggctgccatacgtttgaaggaattcgtccaagatgcctggtggaaagggagagaggagggggtgaggcctccagactctcctctaggagtcggagragggagagaggctagttgcttaagggctccttactctgtacgcaggtcacatgctcctctcgcagggggctgtgctggccggctttctccccaggcctct

SEQ ID NO: 558770 - DNA, 201 bp, Homo sapiens
tctaaaacagattacttcctgctccacaactgactatgagccaaatgaggggatgcataacagcctcccgaccctttaacccaactgacttcagagctagrggaggtggccccatcatctgcttacctgcaacacaaaagcaccacagtcactgtcattattctgcctggccacattctagagaagagaaagaaagcaggc

SEQ ID NO: 558771 - DNA, 201 bp, Homo sapiens
tggaaaactcctgctggaaaatgtcctccagcttctctactacctcatcagtgctgaggggtatgaggctgccatacgtttgaaggaattcgtccaagatrcctggtggaaagggagagaggagggggtgaggcctccagactctcctctaggagtcggaggagggagagaggctagttgcttaagggctccttactctgt

SEQ ID NO: 558772 - DNA, 201 bp, Homo sapiens
cggaggagggagagaggctagttgcttaagggctccttactctgtacgcaggtcacatgctcctctcgcagggggctgtgctggccggctttctccccagrcctctctgcctcttctgccatgcccaaatctgagccctgaaaaagctcctgggccacatggtccccgatgctgcacacattgctgatgaggatgctggca

SEQ ID NO: 558773 - DNA, 201 bp, Homo sapiens
ccaaagggaagtgagtgggaagaggcaagagaggaaaggaactggagtttcttgggaagggactcccatgtctcccttcccatttatgggcttggggtctsgggtacgaggctcacacagtgagtttgcagtgacacagctccttgtagatctgccgacgaagtttgggcatgtcctgctgggtgaagctgaatggctgag

SEQ ID NO: 558774 - DNA, 201 bp, Homo sapiens
tgctccctgcacggggaagggggaggatgactgctccacccagggccacagggccacactcccctgcaaacagaggaagaaaggggcttttctgtagccaycccctgcacatcagaaatcaacaagtattctctcaaagaaaaaaaaatacacgaaattgaaacatttaaatatgaaaaaccaaagggaagtgagtgggaa

SEQ ID NO: 558775 - DNA, 201 bp, Homo sapiens
agctaagcatatccactaatttgaagccccttaaggaagaccaccacttacgtatcaacaaaggatcctttattgaccagagcaggaccgtggcatttttwtatatatatatatatatatatatatatatatatatatatatatatatatatatatatatatatatatatatatatgatatctggcgggctgtgatcctat

SEQ ID NO: 558776 - DNA, 201 bp, Homo sapiens
ggaaggtctgagctaagcatatccactaatttgaagccccttaaggaagaccaccacttacgtatcaacaaaggatcctttattgaccagagcaggaccgkggcatttttatatatatatatatatatatatatatatatatatatatatatatatatatatatatatatatatatatatatatatgatatctggcgggct

SEQ ID NO: 558777 - DNA, 201 bp, Homo sapiens
aggtacaacaaacagaagtcttgccttttgccatgaaggttctagagaggaacagagacacaggtaagggaaccaagtgaaagaacagaagacccaaggcytagattgtgggcaagctcaggatctgcatgtttcggttcttcggggtaagggaggaaggtcagacaatggaggagacatcagaacgaacacttgagaacc

SEQ ID NO: 558778 - DNA, 201 bp, Homo sapiens
ccagggtggagtgcagtggcacaatctcggctcactgcaacctctgcctcccgggttcaagcgattctcctgcctcagcctcccggggactacaggcgcamgccaccacgcccagctaattttcatatttttagtagagacagggtttcgccaggtcggccaggctggtctcaatctcttgaccttgcgatccatctgcct

SEQ ID NO: 558779 - DNA, 201 bp, Homo sapiens
tctcccacttttcccgttacataggccaaaaacctaggcatcatcctccatttctttttcttcatttcccacatccaacctgcagaggaaaaaacaaatctttttttttttttttttttttgagacggagtcttgctctgttgcccagactggagtgcagtggcgtgatcttgcctcactgcaagctccacctcctgggtt

SEQ ID NO: 558780 - DNA, 201 bp, Homo sapiens
cctggtctcccagagtgctgggattacaggcatgagctaccatgcccggtggcctttttctttttctttttttttttaaatcttgttttacaatagttacrataggaacccatcccaatccttggggctggccatagcgaaaaacactaaatactggcagaaaggaaaacaactgataaatccagagcccaagattacgga

SEQ ID NO: 558781 - DNA, 201 bp, Homo sapiens
gcttctgggccgcgtgccgcgccgccgagcaccccgccgcgccgcctctggctctgcttcagcttcagcttccacctccacctccacctccgccaccgccrccaccagcgccaccgccgccgccgccactcctccccccctcctccttcccctcccgcgagccccgggcccaccggcagcggtggcgcacgattagtacgt

SEQ ID NO: 558782 - DNA, 201 bp, Homo sapiens
ccaaggcctagattgtgggcaagctcaggatctgcatgtttcggttcttcggggtaagggaggaaggtcagacaatggaggagacatcagaacgaacactkgagaacccatgatgggcaggcgcttttcacactttaaagggagaagcacttagcagctaagaacccaggcccaggattctggagcctgccagaattcaaa

SEQ ID NO: 558783 - DNA, 201 bp, Homo sapiens
acaataggaacccatcccaatccttggggctggccatagcgaaaaacactaaatactggcagaaaggaaaacaactgataaatccagagcccaagattacrgatttgaaattaatacactaccactaccacctctctccctgaaacagagaccctctctgtgtaaaatgaaagagatgaaaggagcttaaaaagctgctta

SEQ ID NO: 558784 - DNA, 201 bp, Homo sapiens
gaggccacgacagagccggcgtgccgagatgcccaaaccccgcgcgggggccagcgactctcgcgccagtaggcccttgacttggatcaagacgggggackggggactcccaggacgcgagcagagtgaacgaggacaaggtgatgctccacgcgcttctacttcaagtctggtccggttcggcctggtctgggccagccg

SEQ ID NO: 558785 - DNA, 201 bp, Homo sapiens
cccgagactttctggcaccgcaccgcgcgctgcaggcgcgcttcgatgacggccaggtgggcgtgagccgggcggggccgtgcggccgggagatgggcccmgtgccgtggctcttttacacgcccgttctcccgcaggttccggagcatttgctccatgccctcgcctgcctgcagggccccggtgtggccccggtgctgc

SEQ ID NO: 558786 - DNA, 201 bp, Homo sapiens
ccaactcccaggttatccacaaagcagaggtctggggctcccacaattgtccaggcaaagctgcttccttcatgggagcatcaccctgtgggtgttcagtyccattcagaaacatggctatcgagtcctgtagtgaatattgaagacgcagaatccgtgttcatttccagtggcatccacggggatctctgtgtttgcata

SEQ ID NO: 558787 - DNA, 201 bp, Homo sapiens
gactgggctgagctctgggcccatccgtggggtgagggcatcacagccaccctgcactgcccccttcccaggagctggccctcagcgcactcctgaagttygtgcagctggaaggagcgcaccccctggagaagtccaagtgggaaggcaactacctgttcccccgagagctcttcaaggtgagggccttgctggggactc

SEQ ID NO: 558788 - DNA, 201 bp, Homo sapiens
ccccctggagaagtccaagtgggaaggcaactacctgttcccccgagagctcttcaaggtgagggccttgctggggactcccagagggcctggctggctgrccagatcccaggatggccccgtagtgggggcggggcctgctgagctgagcctggctgttggctgggacactcctgtggctcctgtggcccacccaaccag

SEQ ID NO: 558789 - DNA, 201 bp, Homo sapiens
actcctgtggctcctgtggcccacccaaccaggaggagtctgcctggggggctcgatggggcagggctgcctgcctggaccttgctggcgtatgctgggcygggcagggctgctcactggtccttgcccctagttggtggtgggaggcctgctgtctcctgaggaggaccagagcctgctcctgtcccagttccgggagta

SEQ ID NO: 558790 - DNA, 201 bp, Homo sapiens
ggctctgctctgacctcagccctgagatatgcgaggccacccagcccttggccacccacgactgatgtgaaacctacgactctagacgcctgctcttcccrgctctggtgaccctgctcatctccacgctgaccttcccccctggctttggacagttcatggctggacaggtaaccacaggcagaacaggagttttgtgct

SEQ ID NO: 558791 - DNA, 201 bp, Homo sapiens
ttgttgggggcccagctgagcccagcccgccggcggcagcacatgcaggagcgcagagccacccagacctctccactatctgatcaggagggtccccctabccctgaggcttctgtctgcttccaggtgaggggaaaagccacaaacgcttcctaaatgtcattgtgtagactgattgggagggtggtctggggccgtggc

SEQ ID NO: 558792 - DNA, 201 bp, Homo sapiens
gagatccattagagtccctgcccagccctgttgctggggtacatcccagctggaagaggctgcccacatgggccagggctggaactgggatacctctcccygtgtcttccttacctttcctggtcctctccccaaaagatgacattgccccctggggccttatgtttgggaacacagggagcgcagagtcggcaggcatcg

SEQ ID NO: 558793 - DNA, 201 bp, Homo sapiens
tatatgttaggaattactgttactactcctactacttatactgagagatgaattttaaaagatagcatatgctgggcatggtggtgggcacctgtagtccmagctactcaggaggctgaggtgggaggactgcacgagcccaggagttcaagtccaacctgggcaacatagtgagactgtcttctaacacaaaaattttat

SEQ ID NO: 558794 - DNA, 201 bp, Homo sapiens
ctctccaatgctgagaccacgtcattaaccctgcagtgcctgcctctattctccctgcccttcggccctccctgctgtcagctcaggtcctgtggcgtgcyctttcccctgggctccaccacttcccctcacctcccctctccctataacctcaactcctcatctttctggtttggctctaacaaaactgaagaagttgga

SEQ ID NO: 558795 - DNA, 201 bp, Homo sapiens
gtaagaacatttaaaaagtgttaaggcaatttaagtgagttctgagtaattggtacacaagaagctgttattactgctcatcttgattcaaacattaagcsaagaggcttacaagtaaactcagaacagtgagataaatgataggccaaaaattccaggaactgctgagtcaggagagcgtttttcaagacatctggcccc

SEQ ID NO: 558796 - DNA, 201 bp, Homo sapiens
gggctgcgcctgctcctgggcccaactcagctgccccgagctccacgaggctcttattgttgcccatgtgcccctgatcatcccttactccctggccttcscgcctcccacttttagactgtgccacaggtttttccaccttttcctcttctggggcttccctctcactcctcttcagtgccccagccccaggcctgtgag

SEQ ID NO: 558797 - DNA, 201 bp, Homo sapiens
ccagaaggaatcgctaaccacatgacaactgtgttataggtattcaagaaacacagaagaacttttttttttttttttttttgagacgacagcgtctcacyctgtcacccaggctggagtgcagtggcacgatcatggctcactatagcctctgcctcctgggctcaggtgatcctcacaactcagcgcccccaagtagct

SEQ ID NO: 558798 - DNA, 201 bp, Homo sapiens
cactgaggtgcatgcactctgggggccccactcccgtcatggcctcccccgggagggcagcccttccgacagcgacgacaaatgccaatgagcccctcgtrggtggcctaggatggtgctagccatgcccgtcagcccagaatgtgcatctttcattccttctgccttcggaaggcaggaggcagctacagctggaggctg

SEQ ID NO: 558799 - DNA, 201 bp, Homo sapiens
taatgtaagacctagcacggagcctggccaatcactagatttcacgtgtgaacagttgttctgtcccacgtccccctttctaacatgggactaagaattaytcccccatcctatttctccgtcagtgtaagcaatataaggattttgagtatcaagttcctgaggcctggacacagaaacattctcattattattacgatt

SEQ ID NO: 558800 - DNA, 201 bp, Homo sapiens
aaccgggatgaaggtgggggcacccaggggatgagggcagcccgagatggtgccaggtagggggcccacgaggctaggcctgcctccctctgctgttcttycctttagagactattacagccctcttcaaaacccgattccggctcgacttcccctttgacctgcaggagctgccagcctttgctgtcattgggtgaggag

SEQ ID NO: 558801 - DNA, 201 bp, Homo sapiens
gaaaagccacaaacgcttcctaaatgtcattgtgtagactgattgggagggtggtctggggccgtggcctcaccagccccttcctgcctatgcaggtgaayacagaagactcagccttcccagcagcccggggggagacccacaagcccctaaagcctgcactcaagagggggcccagtgtcaccaggaacctcggagaga

SEQ ID NO: 558802 - DNA, 201 bp, Homo sapiens
atgagccctgaagaggtaaggtgccactggactctggaccctgtttcttcctggttgtgttcaatcatcatgttggctgctgtccccatgggagggaccayggggttggaaaaagggcaggccagctttcagggaggtgaggtcagctacaggcaccttctccctaaacctcatagtctcttcccctcagattctggagtg

SEQ ID NO: 558803 - DNA, 201 bp, Homo sapiens
aaagaggaagctgctcggattcgcctgggagggcctgaaccctggaaaggtcccccttcctctcgggctgccccagagctcttggaatatggacggagccrttgcgcccgatgccgcggtgagaactggggtgggggcaggggacctggctgtgctgtgctgagggaagcagaggccattagagctgctgatgggggagag

SEQ ID NO: 558804 - DNA, 201 bp, Homo sapiens
atcgttactctaaaggaggtgaggtgatggtggcctccaaagctgctccacttccaaaaagtcatggaggcttatgtccagctcacctggggaggaaggcrgggaggagtctgacatctgggtccagacatctgtccctctcacctttccagctccggaaggccatcgagggctctgtcacagcacagggtgtgaaagtcc

SEQ ID NO: 558805 - DNA, 201 bp, Homo sapiens
gggtgggtgggagaggtgcagctgagttggtcacaggccggaggcccagcaggaacgtgataaggattggggctgcgcctgctcctgggcccaactcagcygccccgagctccacgaggctcttattgttgcccatgtgcccctgatcatcccttactccctggccttcccgcctcccacttttagactgtgccacaggtt

SEQ ID NO: 558806 - DNA, 201 bp, Homo sapiens
ccacccttcccacaaccataaaaacgtacagtccagtgaccttggaatgcaggatctgccagaggcctccactacgtgggcattaacaccctggctggggyggggccctgtactgtagccttggcctttcattcagacagaaaggctctaccttctttcctccccaagaagagacactccctcatgactgtcactcactgg

SEQ ID NO: 558807 - DNA, 201 bp, Homo sapiens
gctccagtacctggcctgggtcacctaccctgttgtcctcatcactttctcagccggattcacacagatcctggcccctcaggctgtcggtatgttagaaragaaggggagggcagaggcgggacccctgaaatgggtgcatcgaatgcctctcctgagactgttccctctccaggctctggcatccctgagatgaagacc

SEQ ID NO: 558808 - DNA, 201 bp, Homo sapiens
ggccaggatgtttaggaagtgaattggtaaggcttggtgactgtcaggggcaagtggtttgcaaacctgaaaggcatatcgcccgccagaagctcacctgrttaggattgtggagaaaaagaaaattcaagggaactatttaataggctccttgggagaagatgagaggggttatttgaccataagaagacaaggctaagg

SEQ ID NO: 558809 - DNA, 201 bp, Homo sapiens
aggagcgcagagccacccagacctctccactatctgatcaggagggtccccctacccctgaggcttctgtctgcttccaggtgaggggaaaagccacaaaygcttcctaaatgtcattgtgtagactgattgggagggtggtctggggccgtggcctcaccagccccttcctgcctatgcaggtgaacacagaagactcag

SEQ ID NO: 558810 - DNA, 201 bp, Homo sapiens
aattaaagctaacttgtagcacgtaggactccagttagccagaaggaatcgctaaccacatgacaactgtgttataggtattcaagaaacacagaagaacttttttttttttttttttttgagacgacagcgtctcactctgtcacccaggctggagtgcagtggcacgatcatggctcactatagcctctgcctcctggg

SEQ ID NO: 558811 - DNA, 201 bp, Homo sapiens
gcaggagcgcagagccacccagacctctccactatctgatcaggagggtccccctacccctgaggcttctgtctgcttccaggtgaggggaaaagccacaracgcttcctaaatgtcattgtgtagactgattgggagggtggtctggggccgtggcctcaccagccccttcctgcctatgcaggtgaacacagaagactc

SEQ ID NO: 558812 - DNA, 201 bp, Homo sapiens
tcgcttttctccccacactgcagactcacactatcttctcactgctgggagtggaccatgcttatgtcaccagtattggcagactcattggaatcgttacyctaaaggaggtgaggtgatggtggcctccaaagctgctccacttccaaaaagtcatggaggcttatgtccagctcacctggggaggaaggcggggaggag

SEQ ID NO: 558813 - DNA, 201 bp, Homo sapiens
cttgccaggtgggggcttccctctggtgtgtggcctgcatgcaaggccccccactctgagtgtgagagaaggacggggctggagggctccctctcagctcytgagtccttccacctgttctgtccagagtccatgattctgctgggctccatcgagcgttcacaggtggtggcattgttgggggcccagctgagcccagcc

SEQ ID NO: 558814 - DNA, 201 bp, Homo sapiens
gactctcccgtcccatcaccccagcatccacagtcacagcccagccatcctcagcctccgctgtcccccaacccaccgctgggctcagtgcagctccagartggggctgaggccaccaagccctctccacccaccctaagtgagaggctttccactcccagctgggctggcaggctggtgggggtggcagtggagaatggg

SEQ ID NO: 558815 - DNA, 201 bp, Homo sapiens
gtatcaagttcctgaggcctggacacagaaacattctcattattattacgattgttattattttccctccagcagtcctgtctccttccctcccaatctgkggcacccctcctattccacaccaaccttgtcctgggcccctgtggcctgtcatttagagctgcccctcgtccatcaagtccaatcgcttttctccccaca

SEQ ID NO: 558816 - DNA, 201 bp, Homo sapiens
ggtgaggccaggaggggtcccaggtgctaggggcattgcccagggtcgaagcttcgggaaggggcagggagctcaggaccagtctccttggttccaaaggraatggaccagcacttgccaggtgggggcttccctctggtgtgtggcctgcatgcaaggccccccactctgagtgtgagagaaggacggggctggagggct

SEQ ID NO: 558817 - DNA, 201 bp, Homo sapiens
gggggcacccaggggatgagggcagcccgagatggtgccaggtagggggcccacgaggctaggcctgcctccctctgctgttcttccctttagagactatyacagccctcttcaaaacccgattccggctcgacttcccctttgacctgcaggagctgccagcctttgctgtcattgggtgaggagctgagggggctgggg

SEQ ID NO: 558818 - DNA, 201 bp, Homo sapiens
aatgagctctcagggtcgagctctgtcccgggcactctgtgctccagcctgctcccgccccccttcaccatcctatccctttgtctttctctcccactctsacctccctcctcctacaccgtgcttgcctcttaatactctccattctcttcctcctccgtacttcttcctctctcatccccttctttctcttctccatcc

SEQ ID NO: 558819 - DNA, 201 bp, Homo sapiens
tcaagaaactgccctacctgcctgagctcggctggggccgccaccagtacggagggctgggtgccaagggggctgtgggtgaagggcagagggcatcctakatccccctacagccacctctagcaaggtcctggagcctacgaagctgggagatgagccaccttcgtccacactctggaggggctgtagctggcccctgct

SEQ ID NO: 558820 - DNA, 201 bp, Homo sapiens
cagtggggatcttggtccccctacaagtttggactcaggccagtggggaaggagggaggagaagggagttggctcagtgcggagatgttttttagacataytgcttggatgatgggaggtgggagcagcctcctcctgctctgtggtggagccaggcatcgtttttcctctgctcagccttgccctcgagggaactctgga

SEQ ID NO: 558821 - DNA, 201 bp, Homo sapiens
cccctagcagggttgcagtctgtaggagcacaacacgctgcaggggagagagtacccttacttccagatgtgcactctgacttccctgctagagttaattmatcctgccttctccagtgctccaatggggaagccaagctgtctaggcctccagcactgcactgtcacagcttctttcccaccaccaacttgataggaaag

SEQ ID NO: 558822 - DNA, 201 bp, Homo sapiens; identical to SEQ ID NO: 420857

SEQ ID NO: 558823 - DNA, 201 bp, Homo sapiens; identical to SEQ ID NO: 420859

SEQ ID NO: 558824 - DNA, 201 bp, Homo sapiens; identical to SEQ ID NO: 420861
